(19) United States
(12) Patent Application Publication
(10) Pub. No.: US 2023/0340522 A1
(43) Pub. Date: Oct. 26, 2023

(54) INSECTICIDAL PROTEINS AND METHODS FOR THEIR USE

(71) Applicant: PIONEER HI-BRED INTERNATIONAL, INC., JOHNSTON, IA (US)

(72) Inventors: NURIA JIMENEZ-JUAREZ, WEST DES MOINES, IA (US); ALBERT L LU, WEST DES MOINES, IA (US); LU LIU, PALO ALTO, CA (US); MARK EDWARD NELSON, WAUKEE, IA (US); GUSUI WU, FOSTER CITY, CA (US)

(73) Assignee: PIONEER HI-BRED INTERNATIONAL, INC., JOHNSTON, IA (US)

(21) Appl. No.: 18/159,384

(22) Filed: Jan. 25, 2023

Related U.S. Application Data
(63) Continuation of application No. 16/479,050, filed on Jul. 18, 2019, now abandoned.
(60) Provisional application No. 62/452,627, filed on Jan. 31, 2017.

(51) Int. Cl. C12N 15/82; C07K 14/415

(52) U.S. Cl. CPC C12N 15/8286; C07K 14/415; A01H 6/542

(57) ABSTRACT

Compositions and methods for controlling pests are provided. The methods involve transforming organisms with a nucleic acid sequence encoding an insecticidal protein. In particular, the nucleic acid sequences are useful for preparing plants and microorganisms that possess insecticidal activity. Thus, transformed bacteria, plants, plant cells, plant tissues and seeds are provided. Compositions are insecticidal nucleic acids and proteins of bacterial species. The sequences find use in the construction of expression vectors for subsequent transformation into organisms of interest including plants, as probes for the isolation of other homologous (or partially homologous) genes. The pesticidal proteins find use in controlling, inhibiting growth or killing Lepidopteran, Coleopteran, Dipteran, fungal, Hemipteran and nematode pest populations and for producing compositions with insecticidal activity.

### CROSS-REFERENCE TO RELATED APPLICATIONS

[0001] This application claims the benefit of International Application No. PCT/US2018/013253, filed on Jan. 11, 2018, which claims the benefit of U.S. Provisional Application No. 62/452,627, filed Jan. 31, 2017, each of which is hereby incorporated herein in its entirety by reference.

### REFERENCE TO SEQUENCE LISTING SUBMITTED ELECTRONICALLY

[0002] The official copy of the sequence listing is submitted electronically via EFS-Web as an ASCII formatted sequence listing with a file named “7417WOPCT_SequenceListing.txt” created on Jan. 18, 2017, and having a size of 4,505 kilobytes and is filed concurrently with the specification. The sequence listing contained in this ASCII formatted document is part of the specification and is herein incorporated by reference in its entirety.

### FIELD

[0003] This disclosure relates to the field of molecular biology. Provided are novel genes that encode pesticidal proteins. These pesticidal proteins and the nucleic acid sequences that encode them are useful in preparing pesticidal formulations and in the production of transgenic pest-resistant plants.

### BACKGROUND

[0004] Biological control of insect pests of agricultural significance using a microbial agent, such as fungi, bacteria or another species of insect affords an environmentally friendly and commercially attractive alternative to synthetic chemical pesticides. Generally speaking, the use of biopesticides presents a lower risk of pollution and environmental hazards and biopesticides provide greater target specificity than is characteristic of traditional broad-spectrum chemical insecticides. In addition, biopesticides often cost less to produce and thus improve economic yield for a wide variety of crops.

[0005] Certain species of microorganisms of the genus Bacillus are known to possess pesticidal activity against a range of insect pests including Lepidoptera, Diptera, Coleoptera, Hemiptera and others. Bacillus thuringiensis (Bt) and Bacillus popilliae are among the most successful biocontrol agents discovered to date. Insect pathogenicity has also been attributed to strains of B. larvae, B. lentimorbus, B. sphaericus and B. cereus. Microbial insecticides, particularly those obtained from Bacillus strains, have played an important role in agriculture as alternatives to chemical pest control.

[0006] Crop plants have been developed with enhanced insect resistance by genetically engineering crop plants to produce pesticidal proteins from Bacillus. For example, corn and cotton plants have been genetically engineered to produce pesticidal proteins isolated from strains of Bt. These genetically engineered crops are now widely used in agriculture and have provided the farmer with an environmentally friendly alternative to traditional insect-control methods. While they have proven to be very successful commercially, these genetically engineered, insect-resistant crop plants provide resistance to only a narrow range of the economically important insect pests. In some cases, insects can develop resistance to different insecticidal compounds, which raises the need to identify alternative biological control agents for pest control.

[0007] Accordingly, there remains a need for new pesticidal proteins with different ranges of insecticidal activity against insect pests, e.g., insecticidal proteins which are active against a variety of insects in the order Lepidoptera and/or the order Coleoptera including but not limited to insect pests that have developed resistance to existing insecticides.

### SUMMARY

[0008] Compositions and methods for conferring pesticidal activity to bacteria, plants, plant cells, tissues and seeds are provided. Compositions include nucleic acid molecules encoding sequences for pesticidal and insecticidal polypeptides, vectors comprising those nucleic acid molecules, and host cells comprising the vectors. Compositions also include the pesticidal polypeptide sequences and antibodies to those polypeptides. The nucleic acid sequences can be used in DNA constructs or expression cassettes for transformation and expression in organisms, including microorganisms and plants. The nucleotide or amino acid sequences may be synthetic sequences that have been designed for expression in an organism including, but not limited to, a microorganism or a plant. Compositions also comprise transformed bacteria, plants, plant cells, tissues and seeds.

[0009] In particular, isolated or recombinant nucleic acid molecules are provided encoding pteridophyta Insecticidal Protein-83 (PtIP-83) polypeptides including amino acid substitutions, deletions, insertions, fragments thereof. Additionally, amino acid sequences corresponding to the PtIP-83 polypeptides are encompassed. Provided are isolated or recombinant nucleic acid molecules capable of encoding PtIP-83 polypeptides of SEQ ID NO: 1, SEQ ID NO: 3, SEQ ID NO: 5, SEQ ID NO: 7, SEQ ID NO: 9, SEQ ID NO: 11, SEQ ID NO: 13, SEQ ID NO: 15, SEQ ID NO: 17, SEQ ID NO: 19, SEQ ID NO: 21, SEQ ID NO: 23, SEQ ID NO: 716, SEQ ID NO: 754, SEQ ID NO: 755, SEQ ID NO: 756, SEQ ID NO: 757, SEQ ID NO: 758, SEQ ID NO: 759, SEQ ID NO: 760, SEQ ID NO: 761, SEQ ID NO: 762, SEQ ID NO: 763, SEQ ID NO: 764, SEQ ID NO: 765, SEQ ID NO: 766, SEQ ID NO: 767, SEQ ID NO: 768, SEQ ID NO: 769, and SEQ ID NOs: 958-1026, as well as amino acid substitutions, deletions, insertions, fragments thereof, and combinations thereof. Nucleic acid sequences that are complementary to a nucleic acid sequence of the embodiments or that hybridize to a sequence of the embodiments are also encompassed. Also provided are isolated or recombinant PtIP-83 polypeptides of SEQ ID NO: 1, SEQ ID NO: 3, SEQ ID NO: 5, SEQ ID NO: 7, SEQ ID NO: 9, SEQ ID NO: 11, SEQ ID NO: 13, SEQ ID NO: 15, SEQ ID NO: 17, SEQ ID NO: 19, SEQ ID NO: 21, SEQ ID NO: 23, SEQ ID NO: 716, SEQ ID NO: 754, SEQ ID NO: 755, SEQ ID NO: 756, SEQ ID NO: 757, SEQ ID NO: 758, SEQ ID NO: 759, SEQ ID NO: 760, SEQ ID NO: 761, SEQ ID NO: 762, SEQ ID NO: 763, SEQ ID NO: 764, SEQ ID NO: 765, SEQ ID NO: 766, SEQ ID NO: 767, SEQ ID NO: 768, SEQ ID NO: 769, and SEQ ID NOs: 958-1026, as well as amino acid substitutions, deletions, insertions, fragments thereof and combinations thereof.

[0010] Methods are provided for producing the polypeptides and for using those polypeptides for controlling or killing a Lepidopteran, Coleopteran, nematode, fungi, and/or Dipteran pests. The transgenic plants of the embodiments express one or more of the pesticidal sequences disclosed herein. In various embodiments, the transgenic plant further comprises one or more additional genes for insect resistance, for example, one or more additional genes for controlling Coleopteran, Lepidopteran, Hemipteran or nematode pests. It will be understood by one of skill in the art that the transgenic plant may comprise any gene imparting an agronomic trait of interest.

[0011] Methods for detecting the nucleic acids and polypeptides of the embodiments in a sample are also included. A kit for detecting the presence of a PtIP-83 polypeptide or detecting the presence of a polynucleotide encoding a PtIP-83 polypeptide in a sample is provided. The kit may be provided along with all reagents and control samples necessary for carrying out a method for detecting the intended agent, as well as instructions for use.

[0012] Compositions and methods for addressing insect resistance management are also contemplated by the disclosure. In one embodiment, compositions are contemplated that comprise polynucleotide sequences encoding PtIP-83Aa (SEQ ID NO: 1) and PtIP-83Cb (SEQ ID NO: 7) or PtIP-83Gb (SEQ ID NO: 798) polypeptides disclosed herein. In another embodiment, methods are contemplated for minimizing the development of insect resistance comprising utilizing compositions, including transgenic plants, comprising polynucleotide sequences encoding PtIP-83Aa (SEQ ID NO: 1) and PtIP-83Cb (SEQ ID NO: 7) or PtIP-83Gb (SEQ ID NO: 798) polypeptides disclosed herein.

[0013] The compositions and methods of the embodiments are useful for the production of organisms with enhanced pest resistance or tolerance. These organisms and compositions comprising the organisms are desirable for agricultural purposes. The compositions of the embodiments are also useful for generating altered or improved proteins that have pesticidal activity or for detecting the presence of PtIP-83 polypeptides.

### BRIEF DESCRIPTION OF THE FIGURES

[0014] FIG. 1 the phylogeny of ferns based on the classification for extant ferns by A. R. Smith et al, TAXON, 55:705-731 (2006).

[0015] FIG. 2a-2j shows an alignment of the amino acid sequences of PtIP-83Aa (SEQ ID NO: 1), PtIP-83Ca (SEQ ID NO: 5), PtIP-83Cb (SEQ ID NO: 7), PtIP-83Cc (SEQ ID NO: 9), PtIP-83Cd (SEQ ID NO: 11), PtIP-83Ce (SEQ ID NO: 13), PtIP-83Cf (SEQ ID NO: 15), and PtIP-83Fa (SEQ ID NO: 3); an alignment of the secondary structure prediction, by the PSIPRED, top ranked secondary structure prediction method, for PtIP-83Aa (SEQ ID NO: 1) and PtIP-83Fa (SEQ ID NO: 3); and the locations of the amino acid sequence MOTIFs, as predicted by MEME motif analysis, relative to PtIP-83Aa (SEQ ID NO: 1). A “H” indicates a predicted helical structure, an “E” indicates a PtIP-beta strand structure, and a “C” indicates a predicted coil structure.

[0016] FIG. 3a-3b shows a sequence alignment between PtIP-83Aa (SEQ ID NO: 1) and PtIP-50Aa (SEQ ID NO: 34). The crossover points in the PtIP-83 Aa/PtIP-50Aa chimeras indicated in Table 13 are indicated by an arrow (1) above the amino acid.

[0017] FIG. 4a-4c shows an amino acid sequence alignment of PtIP-83Aa (SEQ ID NO: 1), PtIP-83Fa (SEQ ID NO: 3), PtIP-50Aa (SEQ ID NO: 34), PtIP-50Ba (SEQ ID NO: 35), and PtIP-50Bb (SEQ ID NO: 36). The conserved sequence motifs identified are indicated and the amino acid sequence of the motifs in PtIP-83Aa (SEQ ID NO: 1) are underlined.

[0018] FIG. 5a-5e shows an amino acid sequence alignment of PtIP-83Aa (SEQ ID NO: 1), PtIP-83Ca (SEQ ID NO: 5), PtIP-83Cb (SEQ ID NO: 7), PtIP-83Cc (SEQ ID NO: 9), PtIP-83Cd (SEQ ID NO: 11), PtIP-83Ce (SEQ ID NO: 13), PtIP-83Cf (SEQ ID NO: 15), PtIP-83Cg (SEQ ID NO: 17), and PtIP-83 Da (SEQ ID NO: 19). The sequence diversity is highlighted.

[0019] FIG. 6 shows an assessment of specific binding, binding, affinity and competition between PtIP-83Aa and PtIP-83Cb on CEW BBMVs. (A) Gel images show concentration dependent homologous competition between Alexa-labeled and unlabeled PtIP-83Aa or PtIP-83Cb. (B) Apparent binding affinity reported as EC50 determined from fitting the relationship of the signal from Alexa-labeled PtIP-83Aa or PtIP-83Cb vs. concentrations of their unlabeled counterparts. The Alexa-florescence signals were determined by densitometry performed on gel images as represented in (A). (C) Heterologous competition between Alexa-PtIP-83Aa and unlabeled PtIP-83Cb. Each bar reflects the specific binding measured under each condition. (D) Heterologous competition between Alexa-PtIP-83Cb and unlabeled PtIP-83Aa determined as describe in (C).

### DETAILED DESCRIPTION

[0020] It is to be understood that this disclosure is not limited to the particular methodology, protocols, cell lines, genera, and reagents described, as such may vary. It is also to be understood that the terminology used herein is for the purpose of describing particular embodiments only, and is not intended to limit the scope of the present disclosure.

[0021] As used herein the singular forms “a”, “and”, and “the” include plural referents unless the context clearly dictates otherwise. Thus, for example, reference to “a cell” includes a plurality of such cells and reference to “the protein” includes reference to one or more proteins and equivalents thereof known to those skilled in the art, and so forth. All technical and scientific terms used herein have the same meaning as commonly understood to one of ordinary skill in the art to which this disclosure belongs unless clearly indicated otherwise.

[0022] The present disclosure is drawn to compositions and methods for controlling pests. The methods involve transforming organisms with nucleic acid sequences encoding PtIP-83 polypeptides. In particular, the nucleic acid sequences of the embodiments are useful for preparing plants and microorganisms that possess pesticidal activity. Thus, transformed bacteria, plants, plant cells, plant tissues and seeds are provided. The compositions are pesticidal nucleic acids and proteins of bacterial species. The nucleic acid sequences find use in the construction of expression vectors for subsequent transformation into organisms of interest, as probes for the isolation of other homologous (or partially homologous) genes, and for the generation of altered PtIP-83 polypeptides by methods known in the art, such as site directed mutagenesis, domain swapping or DNA shuffling. The PtIP-83 find use in controlling or killing Lepidopteran, Coleopteran, Dipteran, fungal, Hemipteran and nematode pest populations and for producing compositions with pesticidal activity. Insect pests of interest include, but are not limited to, Lepidoptera species including but not limited to: Corn Earworm, (CEW) (Helicoverpa zea Boddie), European Corn Borer (ECB) (Ostrinia nubilalis Hübner), diamond-back moth (DBM) (Plutella xylostella Linnaeus), e.g., Helicoverpa zea Boddie; soybean looper (SBL) Chrysodeixis includens Walker; and velvet bean caterpillar (VBC) (Anticarsia gemmatalis Hübner) and Coleoptera species including but not limited to Western corn rootworm (Diabrotica virgifera)—WCRW, Southern corn rootworm (Diabrotica undecimpunctata howardi)—SCRW, and Northern corn rootworm (Diabrotica barberi)—NCRW.

[0023] By “pesticidal toxin” or “pesticidal protein” is used herein to refer to a toxin that has toxic activity against one or more pests, including, but not limited to, members of the Lepidoptera, Diptera, Hemiptera and Coleoptera orders or the Nematoda phylum or a protein that has homology to such a protein. Pesticidal proteins have been purified from organisms including, for example, Bacillus sp., Pseudomonas sp., Photorhabdus sp., Xenorhabdus sp., Clostridium bifermentans and Paenibacillus popilliae.

[0024] In some embodiments the PtIP-83 polypeptide include amino acid sequences deduced from the full-length nucleic acid sequences disclosed herein and amino acid sequences that are shorter than the full-length sequences, either due to the use of an alternate downstream start site or due to processing that produces a shorter protein having pesticidal activity. Processing may occur in the organism the protein is expressed in or in the pest after ingestion of the protein.

[0025] Thus, provided herein are novel isolated or recombinant nucleic acid sequences that confer pesticidal activity. Also provided are the amino acid sequences of PtIP-83 polypeptides. The protein resulting from translation of these PtIP-83 polypeptide genes allows cells to control or kill pests that ingest it.

### Nucleic Acid Molecules, and Variants and Fragments Thereof

[0026] One aspect pertains to isolated or recombinant nucleic acid molecules comprising nucleic acid sequences encoding PtIP-83 polypeptides or biologically active portions thereof, as well as nucleic acid molecules sufficient for use as hybridization probes to identify nucleic acid molecules encoding proteins with regions of sequence homology. As used herein, the term “nucleic acid molecule” refers to DNA molecules (e.g., recombinant DNA, cDNA, genomic DNA, plastid DNA, mitochondrial DNA) and RNA molecules (e.g., mRNA) and analogs of the DNA or RNA generated using nucleotide analogs. The nucleic acid molecule can be single-stranded or double-stranded, but preferably is double-stranded DNA.

[0027] An “isolated” nucleic acid molecule (or DNA) is used herein to refer to a nucleic acid sequence (or DNA) that is no longer in its natural environment, for example in vitro. A “recombinant” nucleic acid molecule (or DNA) is used herein to refer to a nucleic acid sequence (or DNA) that is in a recombinant bacterial or plant host cell. In some embodiments, an “isolated” or “recombinant” nucleic acid is free of sequences (preferably protein encoding sequences) that naturally flank the nucleic acid (i.e., sequences located at the 5′ and 3′ ends of the nucleic acid) in the genomic DNA of the organism from which the nucleic acid is derived. For purposes of the disclosure, “isolated” or “recombinant” when used to refer to nucleic acid molecules excludes isolated chromosomes. For example, in various embodiments, the recombinant nucleic acid molecule encoding PtIP-83 polypeptides can contain less than about 5 kb, 4 kb, 3 kb, 2 kb, 1 kb, 0.5 kb or 0.1 kb of nucleic acid sequences that naturally flank the nucleic acid molecule in genomic DNA of the cell from which the nucleic acid is derived.

[0028] In some embodiments an isolated nucleic acid molecule encoding PtIP-83 polypeptides has one or more change in the nucleic acid sequence compared to the native or genomic nucleic acid sequence. In some embodiments the change in the native or genomic nucleic acid sequence includes but is not limited to: changes in the nucleic acid sequence due to the degeneracy of the genetic code; changes in the nucleic acid sequence due to the amino acid substitution, insertion, deletion and/or addition compared to the native or genomic sequence; removal of one or more intron; deletion of one or more upstream or downstream regulatory regions; and deletion of the 5′ and/or 3′ untranslated region associated with the genomic nucleic acid sequence. In some embodiments the nucleic acid molecule encoding a PtIP-83 polypeptide is a non-genomic sequence.

[0029] A variety of polynucleotides that encode PtIP-83 polypeptides or related proteins are contemplated. Such polynucleotides are useful for production of PtIP-83 polypeptides in host cells when operably linked to suitable promoter, transcription termination and/or polyadenylation sequences. Such polynucleotides are also useful as probes for isolating homologous or substantially homologous polynucleotides that encode PtIP-83 polypeptides or related proteins.

### Polynucleotides Encoding PtIP-83 Polypeptides

[0030] One source of polynucleotides that encode PtIP-83 polypeptides or related proteins is a fern or other primitive plant species which contains a PtIP-83 polynucleotide of SEQ ID NO: 2, SEQ ID NO: 4, SEQ ID NO: 6, SEQ ID NO: 8, SEQ ID NO: 10, SEQ ID NO: 12, SEQ ID NO: 14, SEQ ID NO: 16, SEQ ID NO: 18, SEQ ID NO: 20, SEQ ID NO: 22, SEQ ID NO: 24, SEQ ID NO: 717, SEQ ID NO: 738, SEQ ID NO: 739, SEQ ID NO: 740, SEQ ID NO: 741, SEQ ID NO: 742, SEQ ID NO: 743, SEQ ID NO: 744, SEQ ID NO: 745, SEQ ID NO: 746, SEQ ID NO: 747, SEQ ID NO: 748, SEQ ID NO: 749, SEQ ID NO: 750, SEQ ID NO: 751, SEQ ID NO: 752 or SEQ ID NO: 753, encoding a PtIP-83 polypeptide of SEQ ID NO: 1, SEQ ID NO: 3, SEQ ID NO: 5, SEQ ID NO: 7, SEQ ID NO: 9, SEQ ID NO: 11, SEQ ID NO: 13, SEQ ID NO: 15, SEQ ID NO: 17, SEQ ID NO: 19, SEQ ID NO: 21, SEQ ID NO: 23, SEQ ID NO: 716, SEQ ID NO: 754, SEQ ID NO: 755, SEQ ID NO: 756, SEQ ID NO: 757, SEQ ID NO: 758, SEQ ID NO: 759, SEQ ID NO: 760, SEQ ID NO: 761, SEQ ID NO: 762, SEQ ID NO: 763, SEQ ID NO: 764, SEQ ID NO: 765, SEQ ID NO: 766, SEQ ID NO: 767, SEQ ID NO: 768, SEQ ID NO: 769 or SEQ ID NOs: 889-957. The polynucleotides of SEQ ID NO: 2, SEQ ID NO: 4, SEQ ID NO: 6, SEQ ID NO: 8, SEQ ID NO: 10, SEQ ID NO: 12, SEQ ID NO: 14, SEQ ID NO: 16, SEQ ID NO: 18, SEQ ID NO: 20, SEQ ID NO: 22, SEQ ID NO: 24, SEQ ID NO: 717, SEQ ID NO: 738, SEQ ID NO: 739, SEQ ID NO: 740, SEQ ID NO: 741, SEQ ID NO: 742, SEQ ID NO: 743, SEQ ID NO: 744, SEQ ID NO: 745, SEQ ID NO: 746, SEQ ID NO: 747, SEQ ID NO: 748, SEQ ID NO: 749, SEQ ID NO: 750, SEQ ID NO: 751, SEQ ID NO: 752 and SEQ ID NO: 753 can be used to express PtIP-83 polypeptides in bacterial hosts that include but are not limited to Agrobacterium, Bacillus, Escherichia, Salmonella, Pseudomonas and Rhizobium bacterial host cells. The polynucleotides are also useful as probes for isolating homologous or substantially homologous polynucleotides that encode PtIP-83 polypeptides or related proteins. Such probes can be used to identify homologous or substantially homologous polynucleotides derived from Pteridophyta species.

[0031] Polynucleotides that encode PtIP-83 polypeptides can also be synthesized de novo from a PtIP-83 polypeptide sequence. The sequence of the polynucleotide gene can be deduced from a PtIP-83 polypeptide sequence through use of the genetic code. Computer programs such as “BackTranslate” (GCG™ Package, Acclerys, Inc. San Diego, Calif.) can be used to convert a peptide sequence to the corresponding nucleotide sequence encoding the peptide. Examples of PtIP-83 polypeptide sequences that can be used to obtain corresponding nucleotide encoding sequences include, but are not limited to the PtIP-83 polypeptides of SEQ ID NO: 1, SEQ ID NO: 3, SEQ ID NO: 5, SEQ ID NO: 7, SEQ ID NO: 9, SEQ ID NO: 11, SEQ ID NO: 13, SEQ ID NO: 15, SEQ ID NO: 17, SEQ ID NO: 19, SEQ ID NO: 21, SEQ ID NO: 23, SEQ ID NO: 716, SEQ ID NO: 754, SEQ ID NO: 755, SEQ ID NO: 756, SEQ ID NO: 757, SEQ ID NO: 758, SEQ ID NO: 759, SEQ ID NO: 760, SEQ ID NO: 761, SEQ ID NO: 762, SEQ ID NO: 763, SEQ ID NO: 764, SEQ ID NO: 765, SEQ ID NO: 766, SEQ ID NO: 767, SEQ ID NO: 768, SEQ ID NO: 769 and SEQ ID NOs: 958-1026. Furthermore, synthetic PtIP-83 polynucleotide sequences of the disclosure can be designed so that they will be expressed in plants. Methods are available in the art for synthesizing plant-preferred genes. See, for example, Murray, et al., (1989) Nucleic Acids Res. 17:477-498, and Liu H et al. Mol Bio Rep 37:677-684, 2010, herein incorporated by reference. A Zea maize usage table can be also found at kazusa.or.jp//cgi-bin/show.cgi?species=4577, which can be accessed using the www prefix.

[0032] In some embodiments the nucleic acid molecule encoding a PtIP-83 polypeptide is a polynucleotide having the sequence set forth in SEQ ID NO: 2, SEQ ID NO: 4, SEQ ID NO: 6, SEQ ID NO: 8, SEQ ID NO: 10, SEQ ID NO: 12, SEQ ID NO: 14, SEQ ID NO: 16, SEQ ID NO: 18, SEQ ID NO: 20, SEQ ID NO: 22, SEQ ID NO: 24, SEQ ID NO: 717, SEQ ID NO: 738, SEQ ID NO: 739, SEQ ID NO: 740, SEQ ID NO: 741, SEQ ID NO: 742, SEQ ID NO: 743, SEQ ID NO: 744, SEQ ID NO: 745, SEQ ID NO: 746, SEQ ID NO: 747, SEQ ID NO: 748, SEQ ID NO: 749, SEQ ID NO: 750, SEQ ID NO: 751, SEQ ID NO: 752, SEQ ID NO: 753, and SEQ ID NOs: 889-957, and variants, fragments and complements thereof. “Complement” is used herein to refer to a nucleic acid sequence that is sufficiently complementary to a given nucleic acid sequence such that it can hybridize to the given nucleic acid sequence to thereby form a stable duplex. “Polynucleotide sequence variants” is used herein to refer to a nucleic acid sequence that except for the degeneracy of the genetic code encodes the same polypeptide.

[0033] In some embodiments the nucleic acid molecule encoding the PtIP-83 polypeptide is a non-genomic nucleic acid sequence. As used herein a “non-genomic nucleic acid sequence” or “non-genomic nucleic acid molecule” or “non-genomic polynucleotide” refers to a nucleic acid molecule that has one or more change in the nucleic acid sequence compared to a native or genomic nucleic acid sequence. In some embodiments the change to a native or genomic nucleic acid molecule includes but is not limited to: changes in the nucleic acid sequence due to the degeneracy of the genetic code; codon optimization of the nucleic acid sequence for expression in plants; changes in the nucleic acid sequence to introduce at least one amino acid substitution, insertion, deletion and/or addition compared to the native or genomic sequence; removal of one or more intron associated with the genomic nucleic acid sequence; insertion of one or more heterologous introns; deletion of one or more upstream or downstream regulatory regions associated with the genomic nucleic acid sequence; insertion of one or more heterologous upstream or downstream regulatory regions; deletion of the 5′ and/or 3′ untranslated region associated with the genomic nucleic acid sequence; insertion of a heterologous 5′ and/or 3′ untranslated region; and modification of a polyadenylation site. In some embodiments the non-genomic nucleic acid molecule is a cDNA. In some embodiments the non-genomic nucleic acid molecule is a synthetic nucleic acid sequence.

[0034] In some embodiments the nucleic acid molecule encoding a PtIP-83 polypeptide is a the non-genomic polynucleotide having a nucleotide sequence having at least 50%, 51%, 52%, 53%, 54%, 55%, 56%, 57%, 58%, 59%, 60%, 61%, 62%, 63%, 64%, 65%, 66%, 67%, 68%, 69%, 70%, 71%, 72%, 73%, 74%, 75%, 76%, 77%, 78%, 79%, 80%, 81%, 82%, 83%, 84%, 85%, 86%, 87%, 88%, 89%, 90%, 91%, 92%, 93%, 94%, 95%, 96%, 97%, 98% or 99% identity, to the nucleic acid sequence of SEQ ID NO: 2, SEQ ID NO: 4, SEQ ID NO: 6, SEQ ID NO: 8, SEQ ID NO: 10, SEQ ID NO: 12, SEQ ID NO: 14, SEQ ID NO: 16, SEQ ID NO: 18, SEQ ID NO: 20, SEQ ID NO: 22, SEQ ID NO: 24, SEQ ID NO: 717, SEQ ID NO: 738, SEQ ID NO: 739, SEQ ID NO: 740, SEQ ID NO: 741, SEQ ID NO: 742, SEQ ID NO: 743, SEQ ID NO: 744, SEQ ID NO: 745, SEQ ID NO: 746, SEQ ID NO: 747, SEQ ID NO: 748, SEQ ID NO: 749, SEQ ID NO: 750, SEQ ID NO: 751, SEQ ID NO: 752, SEQ ID NO: 753, or SEQ ID NOs: 889-957, wherein the PtIP-83 polypeptide has insecticidal activity.

[0035] In some embodiments the non-genomic polynucleotide is not the nucleic acid sequence of SEQ ID NO: 2, SEQ ID NO: 4, SEQ ID NO: 6, SEQ ID NO: 8, SEQ ID NO: 10, SEQ ID NO: 12, SEQ ID NO: 14, SEQ ID NO: 16, SEQ ID NO: 18, SEQ ID NO: 20, SEQ ID NO: 22, SEQ ID NO: 24, SEQ ID NO: 717, SEQ ID NO: 738, SEQ ID NO: 739, SEQ ID NO: 740, SEQ ID NO: 741, SEQ ID NO: 742, SEQ ID NO: 743, SEQ ID NO: 744, SEQ ID NO: 745, SEQ ID NO: 746, SEQ ID NO: 747, SEQ ID NO: 748, SEQ ID NO: 749, SEQ ID NO: 750, SEQ ID NO: 751, SEQ ID NO: 752, SEQ ID NO: 753 or SEQ ID NOs: 889-957.

[0036] In some embodiments the nucleic acid molecule encodes a PtIP-83 polypeptide comprising an amino acid sequence having at least 40%, 45%, 50%, 51%, 52%, 53%, 54%, 55%, 56%, 57%, 58%, 59%, 60%, 61%, 62%, 63%, 64%, 65%, 66%, 67%, 68%, 69%, 70%, 71%, 72%, 73%, 74%, 75%, 76%, 77%, 78%, 79%, 80%, 81%, 82%, 83%, 84%, 85%, 86%, 87%, 88%, 89%, 90%, 91%, 92%, 93%, 94%, 95%, 96%, 97%, 98% or 99% identity to the amino acid sequence of SEQ ID NO: 1, SEQ ID NO: 3, SEQ ID NO: 5, SEQ ID NO: 7, SEQ ID NO: 9, SEQ ID NO: 11, SEQ ID NO: 13, SEQ ID NO: 15, SEQ ID NO: 17, SEQ ID NO: 19, SEQ ID NO: 21, SEQ ID NO: 23, SEQ ID NO: 716, SEQ ID NO: 754, SEQ ID NO: 755, SEQ ID NO: 756, SEQ ID NO: 757, SEQ ID NO: 758, SEQ ID NO: 759, SEQ ID NO: 760, SEQ ID NO: 761, SEQ ID NO: 762, SEQ ID NO: 763, SEQ ID NO: 764, SEQ ID NO: 765, SEQ ID NO: 766, SEQ ID NO: 767, SEQ ID NO: 768, SEQ ID NO: 769, or SEQ ID NOs: 958-1026, wherein the PtIP-83 polypeptide has insecticidal activity.

[0037] In some embodiments the nucleic acid molecule encodes a PtIP-83 polypeptide comprising an amino acid sequence of SEQ ID NO: 1, SEQ ID NO: 3, SEQ ID NO: 5, SEQ ID NO: 7, SEQ ID NO: 9, SEQ ID NO: 11, SEQ ID NO: 13, SEQ ID NO: 15, SEQ ID NO: 17, SEQ ID NO: 19, SEQ ID NO: 21, SEQ ID NO: 23, SEQ ID NO: 716, SEQ ID NO: 754, SEQ ID NO: 755, SEQ ID NO: 756, SEQ ID NO: 757, SEQ ID NO: 758, SEQ ID NO: 759, SEQ ID NO: 760, SEQ ID NO: 761, SEQ ID NO: 762, SEQ ID NO: 763, SEQ ID NO: 764, SEQ ID NO: 765, SEQ ID NO: 766, SEQ ID NO: 767, SEQ ID NO: 768, SEQ ID NO: 769, or SEQ ID NOs: 958-1026, having 1, 2, 3, 4, 5, 6, 7, 8, 9, 10 11, 12, 13, 14, 15, 16, 17, 18, 19, 20, 21, 22, 23, 24, 25, 26, 27, 28, 29, 30, 31, 32, 33, 34, 35, 36, 37, 38, 39, 40, 41, 42, 43, 44, 45, 46, 47, 48, 49, 50, 51, 52, 53, 54, 55, 56, 57, 58, 59, 60, 61, 62, 63, 64, 65, 66, 67, 68, 69, 70 or more amino acid substitutions compared to the native amino acid at the corresponding position of SEQ ID NO: 1, SEQ ID NO: 3, SEQ ID NO: 5, SEQ ID NO: 7, SEQ ID NO: 9, SEQ ID NO: 11, SEQ ID NO: 13, SEQ ID NO: 15, SEQ ID NO: 17, SEQ ID NO: 19, SEQ ID NO: 21, SEQ ID NO: 23, SEQ ID NO: 716, SEQ ID NO: 754, SEQ ID NO: 755, SEQ ID NO: 756, SEQ ID NO: 757, SEQ ID NO: 758, SEQ ID NO: 759, SEQ ID NO: 760, SEQ ID NO: 761, SEQ ID NO: 762, SEQ ID NO: 763, SEQ ID NO: 764, SEQ ID NO: 765, SEQ ID NO: 766, SEQ ID NO: 767, SEQ ID NO: 768′ SEQ ID NO: 769 or SEQ ID NOs: 958-1026.

[0038] In some embodiments the nucleic acid molecule encodes a PtIP-83 polypeptide comprising an amino acid sequence of any one of SEQ ID NO: 236-299, SEQ ID NO: 334-367, SEQ ID NO: 398-427, SEQ ID NO: 518-607, SEQ ID NO: 640-645, and SEQ ID NO: 728-737.

[0039] In some embodiments the nucleic acid molecule encoding the PtIP-83 polypeptide is any one of SEQ ID NO: 172-235, SEQ ID NO: 300-333, SEQ ID NO: 368-397, SEQ ID NO: 428-517, SEQ ID NO: 634-639, and SEQ ID NO: 718-727.

[0040] In some embodiments the nucleic acid molecule encodes a PtIP-83 polypeptide variant of SEQ ID NO: 1, wherein the amino acid at position 53 is Val, Ala, Cys or Thr; the amino acid at position 54 is Lys, Ala, Cys, Asp, Glu, Gly, His, lie, Leu, Met, Asn, Gln, Arg, Ser or Thr; the amino acid at position 55 is Arg, Ala, Asp, Glu, Phe, Gly, His, Lys, Leu, Met, Asn, Gln, Ser, Thr, Val, Trp or Tyr; the amino acid at position 56 is Leu, Glu, Phe, lie, Met, Thr or Val; the amino acid at position 57 is Tyr, Cys, lie, Leu, Met, Thr or Val; the amino acid at position 58 is Val, Cys, Ile or Leu; the amino acid at position 59 is Phe, Leu, Met, Val or Tyr; the amino acid at position 60 is Ala, Cys, Gly, Ser, Thr or Val; the amino acid at position 61 is Asp, Glu, His or Ser; the amino acid at position 62 is Val, Ala, Cys, lie, Leu or Thr; the amino acid at position 63 is Val, Ala, Cys, lie, Leu, Met or Thr; the amino acid at position 64 is Glu, Ala, Cys, Phe, Gly, His, lie, Leu, Met, Asn, Gln, Arg, Ser, Thr, Val, Trp or Tyr; the amino acid at position 65 is Leu, Ala, Cys, Phe, His, lie, Met, Asn, Gln, Thr, Val or Trp; the amino acid at position 66 is Pro, Asp, Gly, Met, Gln or Arg; the amino acid at position 363 is Gln, Ala, Cys, Glu, Phe, Gly, His, Lys, Leu, Asn, Arg, Ser, Thr, Val or Trp; the amino acid at position 364 is Ile, Ala, Cys, Glu, Phe, His, Lys, Leu, Met, Asn, Gln, Ser, Thr, Val, Trp or Tyr; the amino acid at position 365 is Leu, Ala, Glu, Phe, Gly, His, lie, Lys, Met, Asn, Arg, Val, Trp or Tyr; the amino acid at position 366 is Gly, Ala, Cys, Phe, His, lie, Lys, Leu, Met, Asn, Ser, Thr or Val; the amino acid at position 367 is Ser, Ala, Cys, Asp, Glu, Phe, Gly, His, lie, Leu, Met, Asn, Pro, Gln, Arg, Thr, Val or Trp; the amino acid at position 368 is Tyr, Ala, Cys, Asp, Glu, Phe, Gly, His, lie, Lys, Leu, Met, Asn, Pro, Gln, Arg, Ser, Thr, Val or Trp; the amino acid at position 369 is Leu, Ala, Cys, Asp, Phe, Gly, lie, Met, Thr or Val; the amino acid at position 370 is Leu, Ala, Cys, Asp, Glu, Phe, Gly, His, lie, Lys, Met, Gln, Arg, Ser, Thr, Val, Trp or Tyr; the amino acid at position 371 is Gln, Ala, Cys, Asp, Glu, Phe, Gly, lie, Lys, Leu, Asn, Arg, Ser, Thr, Val or Trp; the amino acid at position 372 is Gln, Ala, Cys, Asp, Phe, Gly, His, lie, Leu, Asn, Arg, Ser, Val or Tyr; the amino acid at position 373 is Asn, Ala, Cys, Asp, Phe, Gly, His, lie, Lys, Gln, Ser, Thr, Val or Trp; the amino acid at position 556 is Trp, Phe, Thr or Tyr; the amino acid at position 557 is Arg, Cys, Asp, Gly, His, lie, Lys, Leu, Met, Asn, Pro, Gln, Ser, Thr, Val, Trp or Tyr; the amino acid at position 558 is Ala, Cys, Asp, Phe, Gly, His, lie, Lys, Leu, Asn, Pro, Gln, Arg, Ser, Val, Trp or Tyr; the amino acid at position 559 is Lys, Ala, Cys, Phe, Gly, His, lie, Leu, Asn, Gln, Arg, Ser, Thr, Val or Tyr; the amino acid at position 560 is Cys, Ala, Phe, Gly, lie, Met, Asn, Arg, Ser, Thr or Val; the amino acid at position 561 is Lys, Ala, Cys, Asp, Glu, Phe, Gly, His, lie, Leu, Met, Asn, Arg, Ser, Thr, Val or Tyr; the amino acid at position 562 is Asn, Cys, Asp, Glu, Gly, His, Leu, Met, Arg, Ser, Thr, Val or Tyr; the amino acid at position 563 is Val, Ala, Cys, Asp, Phe, His, lie, Leu, Met, Asn, Gln, Thr or Trp; the amino acid at position 564 is Ala, Cys, Gly, Met, Gln, Ser, Thr, Val, Trp or Tyr; the amino acid at position 646 is Leu, Ala, Cys, Gly, lie, Met, Asn, Gln, Ser, Thr or Val; the amino acid at position 647 is Leu, Asp, Gly, Met, Asn, Gln or Thr; the amino acid at position 648 is Met, Ala, Cys, Asp, Glu, Phe, Gly, His, Lys, Leu, Asn, Pro, Gln, Arg, Ser, Thr, Val, Trp or Tyr; the amino acid at position 649 is Pro, Ala, Cys, Asp, Glu, Phe, Gly, His, Lys, Met, Asn, Gln, Arg, Ser, Thr, Trp or Tyr; the amino acid at position 650 is Thr, Ala, Cys, Asp, Phe, Gly, His, lie, Lys, Leu, Met, Pro, Gln, Arg, Ser, Val or Tyr; the amino acid at position 651 is Glu, Ala, Cys, Asp, Gly, His, lie, Leu, Met, Asn, Pro, Gln, Arg, Ser, Thr, Val or Tyr; the amino acid at position 652 is Leu, Cys, Phe, lie, Lys, Met, Pro, Arg, Ser, Thr or Val; the amino acid at position 653 is Thr, Cys, Asp, Glu, Phe, Gly, His, lie, Lys, Leu, Pro, Arg, Ser, Val or Trp; the amino acid at position 654 is Thr, Ala, Cys, Phe, lie, Lys, Leu, Met, Pro, Arg, Ser, Val, Trp or Tyr; the amino acid at position 655 is Trp, Phe or Tyr; the amino acid at position 771 is Arg, Ala, Asp, Glu, Phe, Gly, His, lie, Lys, Leu, Asn, Ser, Thr, Val, Trp or Tyr; the amino acid at position 772 is Arg, Ala, Cys, Asp, Glu, Phe, Gly, His, lie, Lys, Leu, Met, Pro, Gln, Ser, Thr, Val, Trp or Tyr; the amino acid at position 773 is Asp, Ala, Glu, Phe, Gly, His, lie, Lys, Leu, Met, Asn, Gln, Arg, Ser, Thr, Val, Trp or Tyr; the amino acid at position 774 is Gln, Ala, Asp, Gly, His, lie, Lys, Leu, Met, Asn, Pro, Arg, Ser, Thr, Val, Trp or Tyr; the amino acid at position 775 is Val, Ala, Cys, Asp, Glu, Gly, His, lie, Asn, Pro, Gln, Arg, Ser, Thr or Tyr; the amino acid at position 776 is Leu, Ala, Cys, Asp, Glu, Phe, Gly, His, lie, Lys, Asn, Pro, Gln, Arg, Ser, Thr, Val or Tyr; the amino acid at position 777 is Pro, Ala, Cys, Asp, Glu, Phe, Gly, His, Lys, Leu, Met, Asn, Gln, Ser, Thr, Val, Trp or Tyr; the amino acid at position 778 is Phe, Ala, His, lie, Leu, Met, Asn, Gln, Ser, Val, Trp or Tyr; the amino acid at position 779 is Gln, Ala, Cys, Asp, Glu, Gly, His, Lys, Leu, Asn, Pro, Arg, Ser, Thr or Val; the amino acid at position 780 is Ala, Cys, Asn, Pro, Gln or Ser; the amino acid at position 781 is Ala, Cys, Asp, Glu, Phe, Gly, His, lie, Asn, Gln, Arg, Ser, Thr, Val, Trp or Tyr; the amino acid at position 782 is Ala, Cys, Asp, Glu, Phe, Gly, His, lie, Lys, Met, Pro, Gln, Arg, Ser, Thr, Val, Trp or Tyr; the amino acid at position 783 is Pro, Ala, Cys, Asp, Glu, Gly, His, Asn, Gln, Arg, Ser, Thr or Val; the amino acid at position 784 is Leu, Ala, Glu, Phe, His, lie, Lys, Met, Asn, Pro, Gln, Ser, Thr, Val or Trp; the amino acid at position 785 is Asn, Ala, Cys, Glu, Phe, Gly, His, lie, Lys, Leu, Met, Gln, Arg, Ser, Thr, Val, Trp or Tyr; and the amino acid at position 786 is Tyr, Phe, lie, Leu or Trp.

[0041] In some embodiments the nucleic acid molecule encodes a PtIP-83 polypeptide variant of SEQ ID NO: 1, wherein the amino acid at position 1 is Met or deleted; the amino acid at position 2 is Ala or deleted; the amino acid at position 3 is Leu, Val or deleted; the amino acid at position 4 is Val, Met or Leu; the amino acid at position 7 is Gly or Ser; the amino acid at position 8 is Lys or Thr; the amino acid at position 10 is Phe or Tyr; the amino acid at position 11 is Glu or Arg; the amino acid at position 18 is Met or lie; the amino acid at position 19 is Gly, Pro or Ala; the amino acid at position 20 is Val or deleted; the amino acid at position 21 is Leu or Val; the amino acid at position 23 is Arg or Gln; the amino acid at position 37 is Val or Leu; the amino acid at position 38 is Arg or Asn; the amino acid at position 40 is Ala or Ser; the amino acid at position 43 is Asn or Asp; the amino acid at position 45 is Gly or Ala; the amino acid at position 46 is Gln or Glu; the amino acid at position 48 is Glu, Pro or Val; the amino acid at position 51 is Glu or Gly; the amino acid at position 52 is Lys, Arg or Thr; the amino acid at position 56 is Leu or Val; the amino acid at position 59 is Phe or Leu; the amino acid at position 66 is Pro or Ala; the amino acid at position 67 is Val, Pro or Thr; the amino acid at position 68 is Val, Arg, Phe or Gly; the amino acid at position 69 is Glu, Ala or Lys; the amino acid at position 70 is Trp, Thr, His, Tyr or Arg; the amino acid at position 71 is Arg, Pro or deleted; the amino acid at position 72 is Trp, Asp, Leu or deleted; the amino acid at position 73 is Pro, Gln, Asn, His or deleted; the amino acid at position 74 is Pro, Met or Thr; the amino acid at position 75 is Gln, His or Arg; the amino acid at position 76 is lie, Met or Leu; the amino acid at position 84 is lie or Val; the amino acid at position 91 is Trp or Phe; the amino acid at position 93 is Thr or lie; the amino acid at position 94 is Asp or Gly; the amino acid at position 96 is Arg or Ser; the amino acid at position 97 is Gln, Phe or Arg; the amino acid at position 98 is Ser or deleted; the amino acid at position 99 is Asp or Ala; the amino acid at position 100 is Thr or Ala; the amino acid at position 101 is Glu, Thr or Trp the amino acid at position 103 is His, Arg, Glu or Gln; the amino acid at position 105 is Thr or Pro; the amino acid at position 108 is Lys, Gln or Glu; the amino acid at position 109 is Leu or Val; the amino acid at position 111 is Ala or Thr; the amino acid at position 112 is lie, Arg, Thr or deleted; the amino acid at position 113 is Gln, Ala, Gly or deleted; the amino acid at position 114 is Arg, Glu or lie; the amino acid at position 115 is Glu or Gln; the amino acid at position 116 is Glu, Asn, Gln or Arg; the amino acid at position 117 is Asn, Val, Tyr or Phe; the amino acid at position 118 is Arg or Lys; the amino acid at position 119 is Trp or Ser; the amino acid at position 122 is Thr, Lys or Ala; the amino acid at position 124 is Ala or Thr; the amino acid at position 126 is Gly or Asp; the amino acid at position 127 is Met or Ala; the amino acid at position 128 is Asn or Lys; the amino acid at position 131 is Val, Ile or Thr; the amino acid at position 133 is lie or Val; the amino acid at position 134 is His or Tyr; the amino acid at position 135 is Ala or Gly; the amino acid at position 137 is Glu or Lys; the amino acid at position 139 is Gln or Glu; the amino acid at position 140 is Val, Arg or Leu; the amino acid at position 141 is Gly or Ser; the amino acid at position 142 is Val or Pro; the amino acid at position 144 is Thr, Leu, Phe or Tyr; the amino acid at position 145 is Met, Pro or Asn; the amino acid at position 146 is Ser, Gly or Asn; the amino acid at position 147 is Trp or Asn; the amino acid at position 148 is Ser, Ala or Pro; the amino acid at position 149 is Ser or deleted; the amino acid at position 150 is Val, Ile or Tyr; the amino acid at position 152 is Arg, Ala, Val or Gly; the amino acid at position 154 is Ser, Trp or Glu; the amino acid at position 156 is Leu, Asp or Gln; the amino acid at position 158 is Ser or Cys; the amino acid at position 159 is Val, Thr or lie; the amino acid at position 162 is Ser or Ala; the amino acid at position 163 is Gly or deleted; the amino acid at position 164 is Phe or deleted; the amino acid at position 165 is Arg or Ala; the amino acid at position 166 is Ala, Arg, Met or Phe; the amino acid at position 167 is Val or His; the amino acid at position 168 is Ser or Asn; the amino acid at position 169 is Val, His or Thr; the amino acid at position 170 is Phe or Val; the amino acid at position 171 is Glu, Asn or Asp; the amino acid at position 172 is Val, Ala, Arg or Glu; the amino acid at position 175 is Ser, Arg or Trp; the amino acid at position 176 is Val or lie; the amino acid at position 177 is Arg or lie; the amino acid at position 179 is Thr, lie, Val or Ser; the amino acid at position 180 is Leu, Phe or Thr; the amino acid at position 181 is Gly, Thr, Gln or Ser; the amino acid at position 182 is Ala, Leu, Phe or lie; the amino acid at position 183 is Thr or Gly; the amino acid at position 184 is Leu, Thr, Ser or Arg; the amino acid at position 185 is Arg, Gly, Asp or Ala; the amino acid at position 186 is Pro, Val or Gln; the amino acid at position 187 is Asp, Thr or Ser; the amino acid at position 188 is His, Gly or Ala; the amino acid at position 189 is Ala, Arg, Pro or deleted; the amino acid at position 190 is Leu, Asn or deleted; the amino acid at position 191 is Tyr or deleted; the amino acid at position 192 is Ser, lie, Val or Asn; the amino acid at position 193 is Thr or Asp; the amino acid at position 194 is Thr or Ser; the amino acid at position 195 is Met or Thr; the amino acid at position 196 is Gln, His, Leu or Ser; the amino acid at position 197 is Ala, Gly or Leu; the amino acid at position 198 is Thr, Glu or Ala; the amino acid at position 199 is Pro or Arg; the amino acid at position 200 is Asn, Ser, Thr or Gly; the amino acid at position 201 is Ala, Leu, Glu or Trp; the amino acid at position 202 is Ser, Asp, Phe or Leu; the amino acid at position 203 is His, Pro, Gly or Ser; the amino acid at position 204 is lie, Trp, His or Gly; the amino acid at position 205 is Ser, Asn or lie; the amino acid at position 206 is Ala, Gly, Asp, Tyr or Arg; the amino acid at position 207 is Phe, Val or Leu; the amino acid at position 208 is Asn, Ser, Pro or Leu; the amino acid at position 210 is Arg, Asp, Glu or Tyr; the amino acid at position 211 is lie, Ser or Thr; the amino acid at position 212 is Val, Ala or Asp; the amino acid at position 214 is Pro or Arg; the amino acid at position 215 is Ser or Thr; the amino acid at position 217 is Tyr or Phe; the amino acid at position 218 is Arg or Ser; the amino acid at position 219 is Val or Ala; the amino acid at position 220 is Cys, Leu or Ser; the amino acid at position 221 is Pro or His; the amino acid at position 222 is Leu, Arg or Ser; the amino acid at position 224 is Asn or Ser; the amino acid at position 225 is Asp, Arg or Thr; the amino acid at position 226 is Thr or Asn; the amino acid at position 227 is Asp, Leu or deleted; the amino acid at position 228 is Thr or deleted; the amino acid at position 229 is Tyr or deleted; the amino acid at position 230 is Leu or deleted; the amino acid at position 231 is Gly or deleted; the amino acid at position 232 is lie or deleted; the amino acid at position 233 is Pro or deleted; the amino acid at position 234 is Ala, Pro or deleted; the amino acid at position 235 is Asp, Ile or Val; the amino acid at position 236 is Val, Ser or Glu; the amino acid at position 237 is Ala, Phe or Tyr; the amino acid at position 238 is Ala or Thr; the amino acid at position 239 is Val, Ser or Gly; the amino acid at position 240 is Leu or lie; the amino acid at position 243 is Asp or Glu; the amino acid at position 249 is Asn or Ser; the amino acid at position 252 is Leu or Met; the amino acid at position 257 is Thr or Ser; the amino acid at position 259 is His or Leu; the amino acid at position 266 is Ala or Val; the amino acid at position 267 is Cys or Gly; the amino acid at position 268 is His, Arg or Tyr; the amino acid at position 272 is Asp or Glu; the amino acid at position 273 is Val, Met, Ile or Leu; the amino acid at position 274 is Val or Met; the amino acid at position 278 is Gly or Ala; the amino acid at position 279 is Glu or Val; the amino acid at position 281 is Leu or Ala; the amino acid at position 282 is Asn, Leu or lie; the amino acid at position 285 is Asn or Ser; the amino acid at position 286 is Lys, Asp or Glu; the amino acid at position 287 is Leu or Val; the amino acid at position 290 is Pro, Gln or Arg; the amino acid at position 291 is Leu or Val; the amino acid at position 292 is Lys or Val; the amino acid at position 293 is Glu or Gln; the amino acid at position 294 is Ser, Asn or Lys; the amino acid at position 295 is Thr or Ser; the amino acid at position 296 is Gln or His; the amino acid at position 297 is Leu or Met; the amino acid at position 300 is Ser or Thr; the amino acid at position 301 is Glu or Ala; the amino acid at position 302 is Ser, Pro or Ala; the amino acid at position 304 is Lys or Asn; the amino acid at position 313 is Val or lie; the amino acid at position 314 is His, Glu or Gln; the amino acid at position 315 is Ala, Cys or Ser; the amino acid at position 316 is Ala or Val; the amino acid at position 317 is Met or lie; the amino acid at position 319 is Met or lie; the amino acid at position 320 is Val or Gly; the amino acid at position 321 is Arg or Pro; the amino acid at position 322 is lie or Phe; the amino acid at position 323 is Gly or Val; the amino acid at position 324 is Leu or Ser; the amino acid at position 336 is Ser or Asn; the amino acid at position 339 is Asn, Lys or Arg; the amino acid at position 350 is Arg or Gln; the amino acid at position 351 is Glu or Asp; the amino acid at position 353 is Lys or Arg; the amino acid at position 354 is Gln or Arg; the amino acid at position 355 is Phe or Leu; the amino acid at position 356 is Lys or Arg; the amino acid at position 360 is lie, Val or Ala; the amino acid at position 365 is Leu or Phe; the amino acid at position 371 is or Glu; the amino acid at position 372 is or Lys; the amino acid at position 374 is Arg or Lys; the amino acid at position 376 is Phe or Leu; the amino acid at position 378 is Glu or Asp; the amino acid at position 381 is Leu or Val; the amino acid at position 388 is Ala or Ser; the amino acid at position 395 is Arg or Lys; the amino acid at position 396 is Glu, Gln or Gly; the amino acid at position 399 is Asp or Asn; the amino acid at position 400 is Asn, Thr or Asp; the amino acid at position 401 is Thr or Ala; the amino acid at position 402 is Phe, Ile or Leu; the amino acid at position 406 is Asp or Glu; the amino acid at position 408 is Leu or Met; the amino acid at position 410 is Gly or Leu; the amino acid at position 414 is Ala or Glu; the amino acid at position 416 is Ser, Asn or Asp; the amino acid at position 417 is Ser, Arg or Gly; the amino acid at position 423 is Lys or Gln; the amino acid at position 431 is Arg or Lys; the amino acid at position 432 is Gln or Glu; the amino acid at position 436 is Arg or Glu; the amino acid at position 440 is Asn or Arg; the amino acid at position 442 is Leu or Val; the amino acid at position 447 is Ser, Lys or Arg; the amino acid at position 448 is Ala or Ser; the amino acid at position 451 is Gln or Met; the amino acid at position 453 is Gly or Ala; the amino acid at position 455 is Ala or Val; the amino acid at position 457 is Leu or Val; the amino acid at position 467 is Val or Ala; the amino acid at position 471 is Gly or Ala; the amino acid at position 475 is Ser or Asn; the amino acid at position 483 is Gly or Ala; the amino acid at position 493 is Gln or Gly; the amino acid at position 504 is Val or lie; the amino acid at position 506 is Asp or His; the amino acid at position 509 is Asp or Asn; the amino acid at position 510 is Ser or Ala; the amino acid at position 512 is Glu or Asp; the amino acid at position 515 is Gly or Ser; the amino acid at position 516 is Gln or His; the amino acid at position 517 is lie or Leu; the amino acid at position 519 is Asp, Gly or Gln; the amino acid at position 522 is Val, Glu, Pro or Val; the amino acid at position 525 is Glu or Asp; the amino acid at position 526 is Leu or Met; the amino acid at position 539 is Val or lie; the amino acid at position 555 is Val or Ala; the amino acid at position 557 is Arg or Lys; the amino acid at position 563 is Val or Met; the amino acid at position 571 is Ser or Cys; the amino acid at position 575 is Val or Glu; the amino acid at position 577 is Met or lie; the amino acid at position 579 is Glu or Gln; the amino acid at position 583 is Asp or Glu; the amino acid at position 589 is Met or Leu; the amino acid at position 590 is Met or Leu; the amino acid at position 593 is Met or lie; the amino acid at position 595 is Arg or Gln; the amino acid at position 596 is Ser or Thr; the amino acid at position 597 is Gln or His; the amino acid at position 607 is Ala or Val; the amino acid at position 608 is Asp or Asn; the amino acid at position 612 is Tyr, His or Phe; the amino acid at position 617 is Thr or lie; the amino acid at position 618 is Gln or His; the amino acid at position 625 is Arg or Ser; the amino acid at position 626 is Met or lie; the amino acid at position 628 is Leu or lie; the amino acid at position 633 is lie or Met; the amino acid at position 634 is Leu or Met; the amino acid at position 642 is Arg or Met; the amino acid at position 648 is Met or Thr; the amino acid at position 651 is Glu or Gln; the amino acid at position 654 is Thr, Val or Ala; the amino acid at position 658 is Gly or Arg; the amino acid at position 663 is Gly or Ala; the amino acid at position 664 is Asp or Asn; the amino acid at position 668 is Ala or Thr; the amino acid at position 669 is Gln or His; the amino acid at position 671 is Asn or Ser the amino acid at position 675 is lie, Val or Ser; the amino acid at position 678 is Met, lie, Ala or Thr; the amino acid at position 682 is Pro or Gln; the amino acid at position 683 is Ser or Pro; the amino acid at position 685 is Asp or Asn; the amino acid at position 694 is Asp or Gly; the amino acid at position 697 is Asn or Ser; the amino acid at position 704 is Glu or Gly; the amino acid at position 714 is Ala or Gly; the amino acid at position 721 is Ser or Phe; the amino acid at position 722 is Ser or Asn; the amino acid at position 724 is Ser or Thr; the amino acid at position 734 is His or Gln; the amino acid at position 736 is Val or Ala; the amino acid at position 737 is Lys or Gln; the amino acid at position 739 is Ala or Ser; the amino acid at position 740 is Ser or Met; the amino acid at position 741 is Gly or Asn; the amino acid at position 742 is lie or Gly; the amino acid at position 743 is Gly or deleted; the amino acid at position 745 is Gly or Asp; the amino acid at position 751 is Thr, Ser or Ala; the amino acid at position 753 is Gln or Arg; the amino acid at position 754 is Thr or Ser; the amino acid at position 756 is Thr or lie; the amino acid at position 757 is Val or lie; the amino acid at position 766 is lie or Val; the amino acid at position 773 is Asp or Glu; the amino acid at position 774 is Gln or Glu; the amino acid at position 776 is Leu or Met; the amino acid at position 777 is Pro or Thr; the amino acid at position 782 is Ala, Asp or Val; the amino acid at position 786 is Tyr or Phe; the amino acid at position 787 is His or Gln; the amino acid at position 788 is Tyr or Met; the amino acid at position 789 is Ala or Arg; the amino acid at position 790 is Tyr or Thr; the amino acid at position 791 is Arg or Ala; the amino acid at position 792 is Leu or Ser; the amino acid at position 796 is Asp or Glu; the amino acid at position 797 is Ser, Thr or Ala the amino acid at position 802 is Glu or Gln; the amino acid at position 806 is Gln, Asp, Glu or His; the amino acid at position 810 is Lys or Thr; the amino acid at position 819 is Arg or His; the amino acid at position 829 is Lys, Ser, Ala or Pro; the amino acid at position 832 is Ala, Lys or Glu; the amino acid at position 833 is Gly or Glu; the amino acid at position 842 is Leu or Pro; the amino acid at position 847 is Gln or Glu; the amino acid at position 848 is lie or Val; the amino acid at position 849 is Val or Ala; the amino acid at position 855 is Thr or Met; the amino acid at position 860 is lie or Val; and the amino acid at position 864 is His or Gln.

[0042] In some embodiments the nucleic acid molecule encodes a PtIP-83 polypeptide variant of SEQ ID NO: 1, wherein the amino acid at position 1 is Met or deleted; the amino acid at position 2 is Ala or deleted; the amino acid at position 3 is Leu, Val, Ile or deleted; the amino acid at position 4 is Val, Met, Ile or Leu; the amino acid at position 7 is Gly, Thr or Ser; the amino acid at position 8 is Lys, Arg, Ser or Thr; the amino acid at position 10 is Phe, Trp or Tyr; the amino acid at position 11 is Glu, Asp, Lys or Arg; the amino acid at position 18 is Met, Val, Leu or lie; the amino acid at position 19 is Gly, Pro or Ala; the amino acid at position 20 is Val, lie, Leu or deleted; the amino acid at position 21 is Leu, Ile or Val; the amino acid at position 23 is Arg, Lys, Asn or Gln; the amino acid at position 37 is Val, Ile or Leu; the amino acid at position 38 is Arg, Lys, Gln or Asn; the amino acid at position 40 is Ala, Gly, Thr or Ser; the amino acid at position 43 is Asn, Gln, Glu or Asp; the amino acid at position 45 is Gly or Ala; the amino acid at position 46 is Gln, Asp, Asn or Glu; the amino acid at position 48 is Glu, Asp, Pro, lie, Leu or Val; the amino acid at position 51 is Glu, Asp, Ala or Gly; the amino acid at position 52 is Lys, Arg, Ser or Thr; the amino acid at position 56 is Leu, Ile or Val; the amino acid at position 59 is Phe, lie, Val or Leu; the amino acid at position 66 is Pro, Gly or Ala; the amino acid at position 67 is Val, Pro, lie, Leu, Ser or Thr; the amino acid at position 68 is Val, Arg, Phe, lie, Leu, Lys or Gly; the amino acid at position 69 is Glu, Ala, Asp, Gly, Arg or Lys; the amino acid at position 70 is Trp, Thr, His, Tyr, Lys or Arg; the amino acid at position 71 is Arg, Pro, Lys or deleted; the amino acid at position 72 is Trp, Asp, Leu, lie, Val, Glu or deleted; the amino acid at position 73 is Pro, Gln, Asn, His or deleted; the amino acid at position 74 is Pro, Met, Ser or Thr; the amino acid at position 75 is Gln, His, Asn, Lys or Arg; the amino acid at position 76 is lie, Met, Val or Leu; the amino acid at position 84 is lie, Leu or Val; the amino acid at position 91 is Trp or Phe; the amino acid at position 93 is Thr, Ser, Leu, Val or lie; the amino acid at position 94 is Asp, Glu, Ala or Gly; the amino acid at position 96 is Arg, Lys, Thr or Ser; the amino acid at position 97 is Gln, Phe, Asn, Lys or Arg; the amino acid at position 98 is Ser, Thr or deleted; the amino acid at position 99 is Asp, Glu, Gly or Ala; the amino acid at position 100 is Thr, Ser, Gly or Ala; the amino acid at position 101 is Glu, Thr, Asp, Ser or Trp the amino acid at position 103 is His, Arg, Lys, Glu or Gln; the amino acid at position 105 is Thr, Ser or Pro; the amino acid at position 108 is Lys, Arg, Asn, Asp, Gln or Glu; the amino acid at position 109 is Leu, Ile or Val; the amino acid at position 111 is Ala, Ser or Thr; the amino acid at position 112 is lie, Arg, Thr, Leu, Val, Lys, Ser or deleted; the amino acid at position 113 is Gln, Ala, Gly, Asn or deleted; the amino acid at position 114 is Arg, Glu, Lys, Asp or lie; the amino acid at position 115 is Glu, Asp, Asn or Gln; the amino acid at position 116 is Glu, Asn, Gln, Asp, Lys or Arg; the amino acid at position 117 is Asn, Val, Tyr, lie, Leu, Gln, Trp or Phe; the amino acid at position 118 is Arg or Lys; the amino acid at position 119 is Trp, Thr or Ser; the amino acid at position 122 is Thr, Lys, Ser, Arg or Ala; the amino acid at position 124 is Ala, Gly, Ser or Thr; the amino acid at position 126 is Gly, Ala, Glu or Asp; the amino acid at position 127 is Met, Gly or Ala; the amino acid at position 128 is Asn, Gln, Arg or Lys; the amino acid at position 131 is Val, lie, Leu, Ser or Thr; the amino acid at position 133 is lie, Leu or Val; the amino acid at position 134 is His or Tyr; the amino acid at position 135 is Ala or Gly; the amino acid at position 137 is Glu, Asp, Arg or Lys; the amino acid at position 139 is Gln, Asn, Asp or Glu; the amino acid at position 140 is Val, Arg, lie, Lys or Leu; the amino acid at position 141 is Gly, Ala, Thr or Ser; the amino acid at position 142 is Val, lie, Leu or Pro; the amino acid at position 144 is Thr, Leu, Phe, lie, Val or Tyr; the amino acid at position 145 is Met, Pro, Gln or Asn; the amino acid at position 146 is Ser, Gly, Thr, Ala, Gln or Asn; the amino acid at position 147 is Trp, Gln, Tyr or Asn; the amino acid at position 148 is Ser, Ala, Thr, Gly or Pro; the amino acid at position 149 is Ser, Thr or deleted; the amino acid at position 150 is Val, lie, Leu or Tyr; the amino acid at position 152 is Arg, Ala, Val, lie, Leu, Lys or Gly; the amino acid at position 154 is Ser, Trp, Thr, Asp or Glu; the amino acid at position 156 is Leu, Asp, lie, Val, Asn, Glu or Gln; the amino acid at position 158 is Ser, Thr or Cys; the amino acid at position 159 is Val, Thr, Leu or lie; the amino acid at position 162 is Ser, Thr, Gly or Ala; the amino acid at position 163 is Gly, Ala or deleted; the amino acid at position 164 is Phe or deleted; the amino acid at position 165 is Arg, Lys, Gly or Ala; the amino acid at position 166 is Ala, Arg, Met, Lys or Phe; the amino acid at position 167 is Val, lie, Leu or His; the amino acid at position 168 is Ser, Thr, Gln or Asn; the amino acid at position 169 is Val, His, lie, Leu, Ser or Thr; the amino acid at position 170 is Phe, lie, Leu or Val; the amino acid at position 171 is Glu, Asn, Gln or Asp; the amino acid at position 172 is Val, Ala, Arg, lie, Leu, Gly, Lys, Asp or Glu; the amino acid at position 175 is Ser, Arg, Thr, Lys or Trp; the amino acid at position 176 is Val, Leu or lie; the amino acid at position 177 is Arg, Lys, Leu, Val or lie; the amino acid at position 179 is Thr, lie, Val, Leu or Ser; the amino acid at position 180 is Leu, Phe, lie, Val, Ser or Thr; the amino acid at position 181 is Gly, Thr, Gln, Asn or Ser; the amino acid at position 182 is Ala, Leu, Phe, Val or lie; the amino acid at position 183 is Thr, Ser, Ala or Gly; the amino acid at position 184 is Leu, Thr, Ser, lie, Val, Lys or Arg; the amino acid at position 185 is Arg, Gly, Asp, Lys, Glu or Ala; the amino acid at position 186 is Pro, Val, lie, Leu, Asn or Gln; the amino acid at position 187 is Asp, Thr, Glu or Ser; the amino acid at position 188 is His, Gly or Ala; the amino acid at position 189 is Ala, Arg, Pro, Lys, Gly or deleted; the amino acid at position 190 is Leu, Asn, lie, Val, Gln or deleted; the amino acid at position 191 is Tyr or deleted; the amino acid at position 192 is Ser, lie, Val, Leu, Thr or Asn; the amino acid at position 193 is Thr, Ser, Glu or Asp; the amino acid at position 194 is Thr or Ser; the amino acid at position 195 is Met or Thr; the amino acid at position 196 is Gln, His, Leu, Asn, lie, Val, Thr or Ser; the amino acid at position 197 is Ala, Gly, lie, Val or Leu; the amino acid at position 198 is Thr, Glu, Ser, Asp, Gly or Ala; the amino acid at position 199 is Pro, Lys or Arg; the amino acid at position 200 is Asn, Ser, Thr, Gln, Ala or Gly; the amino acid at position 201 is Ala, Leu, Glu, lie, Asp or Trp; the amino acid at position 202 is Ser, Asp, Phe, lie, Val, Thr, Glu or Leu; the amino acid at position 203 is His, Pro, Gly, Ala, Thr or Ser; the amino acid at position 204 is lie, Trp, His, Leu, Val, Ala or Gly; the amino acid at position 205 is Ser, Asn, Leu, Val, Thr, Gln or lie; the amino acid at position 206 is Ala, Gly, Asp, Tyr, Glu, Lys or Arg; the amino acid at position 207 is Phe, Val, Ile or Leu; the amino acid at position 208 is Asn, Ser, Pro, Gln, Thr, Val, Ile or Leu; the amino acid at position 210 is Arg, Asp, Glu, Lys, Ser or Tyr; the amino acid at position 211 is lie, Ser, Leu, Val or Thr; the amino acid at position 212 is Val, Ala, lie, Leu, Glu, Gly or Asp; the amino acid at position 214 is Pro, Lys or Arg; the amino acid at position 215 is Ser or Thr; the amino acid at position 217 is Tyr or Phe; the amino acid at position 218 is Arg, Lys, Thr or Ser; the amino acid at position 219 is Val, lie, Leu or Ala; the amino acid at position 220 is Cys, Leu, lie, Val, Thr or Ser; the amino acid at position 221 is Pro or His; the amino acid at position 222 is Leu, Arg, Lys, lie, Val, Thr or Ser; the amino acid at position 224 is Asn, Gln, Thr or Ser; the amino acid at position 225 is Asp, Arg, Glu, Lys, Ser or Thr; the amino acid at position 226 is Thr, Ser, Gln or Asn; the amino acid at position 227 is Asp, Leu, Glu, lie, Val or deleted; the amino acid at position 228 is Thr, Ser or deleted; the amino acid at position 229 is Tyr or deleted; the amino acid at position 230 is Leu, lie, Val or deleted; the amino acid at position 231 is Gly, Ala or deleted; the amino acid at position 232 is lie, Leu, Val or deleted; the amino acid at position 233 is Pro or deleted; the amino acid at position 234 is Ala, Pro, Gly or deleted; the amino acid at position 235 is Asp, lie, Leu, Glu or Val; the amino acid at position 236 is Val, Ser, lie, Leu, Thr, Asp or Glu; the amino acid at position 237 is Ala, Phe or Tyr; the amino acid at position 238 is Ala, Gly, Ser or Thr; the amino acid at position 239 is Val, Ser, lie, Leu, Thr, Ala or Gly; the amino acid at position 240 is Leu, Val or lie; the amino acid at position 243 is Asp or Glu; the amino acid at position 249 is Asn, Gln, Thr or Ser; the amino acid at position 252 is Leu, lie, Val or Met; the amino acid at position 257 is Thr or Ser; the amino acid at position 259 is His, lie, Val or Leu; the amino acid at position 266 is Ala, lie, Leu or Val; the amino acid at position 267 is Cys, Ala or Gly; the amino acid at position 268 is His, Arg, Lys or Tyr; the amino acid at position 272 is Asp or Glu; the amino acid at position 273 is Val, Met, Ile or Leu; the amino acid at position 274 is Val, lie, Leu or Met; the amino acid at position 278 is Gly or Ala; the amino acid at position 279 is Glu, Asp, Gly or Val; the amino acid at position 281 is Leu, lie, Val, Gly or Ala; the amino acid at position 282 is Asn, Leu or lie; the amino acid at position 285 is Asn, Gln, Thr or Ser; the amino acid at position 286 is Lys, Asp, Arg or Glu; the amino acid at position 287 is Leu, Ile or Val; the amino acid at position 290 is Pro, Gln, Asn, Lys or Arg; the amino acid at position 291 is Leu, Ile or Val; the amino acid at position 292 is Lys, Arg, Ile, Leu or Val; the amino acid at position 293 is Glu, Asp, Asn or Gln; the amino acid at position 294 is Ser, Asn, Thr, Gln, Arg or Lys; the amino acid at position 295 is Thr or Ser; the amino acid at position 296 is Gln, Asn or His; the amino acid at position 297 is Leu, Ile, Val or Met; the amino acid at position 300 is Ser or Thr; the amino acid at position 301 is Glu, Asp, Gly or Ala; the amino acid at position 302 is Ser, Pro, Thr, Gly or Ala; the amino acid at position 304 is Lys, Arg, Gln or Asn; the amino acid at position 313 is Val, Leu or Ile; the amino acid at position 314 is His, Glu, Asn, Asp or Gln; the amino acid at position 315 is Ala, Cys, Gly, Thr or Ser; the amino acid at position 316 is Ala, Ile, Leu or Val; the amino acid at position 317 is Met, Leu, Val or Ile; the amino acid at position 319 is Met, Leu, Val or Ile; the amino acid at position 320 is Val, Ile, Leu, Ala or Gly; the amino acid at position 321 is Arg, Lys or Pro; the amino acid at position 322 is Ile, Leu, Val or Phe; the amino acid at position 323 is Gly, Ile, Leu or Val; the amino acid at position 324 is Leu, Ile, Val, Thr or Ser; the amino acid at position 336 is Ser, Thr, Gln or Asn; the amino acid at position 339 is Asn, Lys, Gln or Arg; the amino acid at position 350 is Arg, Lys, Asn or Gln; the amino acid at position 351 is Glu or Asp; the amino acid at position 353 is Lys or Arg; the amino acid at position 354 is Gln, Asn, Lys or Arg; the amino acid at position 355 is Phe, Ile, Leu or Leu; the amino acid at position 356 is Lys or Arg; the amino acid at position 360 is Ile, Val, Leu, Gly or Ala; the amino acid at position 365 is Leu, Ile, Val or Phe; the amino acid at position 371 is or Glu or Asp; the amino acid at position 372 is or Lys or Arg; the amino acid at position 374 is Arg or Lys; the amino acid at position 376 is Phe, Ile, Val or Leu; the amino acid at position 378 is Glu or Asp; the amino acid at position 381 is Leu, Ile or Val; the amino acid at position 388 is Ala, Thr, Gly or Ser; the amino acid at position 395 is Arg or Lys; the amino acid at position 396 is Glu, Gln, Asp, Asn, Ala or Gly; the amino acid at position 399 is Asp, Gln, Glu or Asn; the amino acid at position 400 is Asn, Thr, Ser, Glu, Gln or Asp; the amino acid at position 401 is Thr, Ser, Gly or Ala; the amino acid at position 402 is Phe, Ile, Val or Leu; the amino acid at position 406 is Asp or Glu; the amino acid at position 408 is Leu, Ile, Val or Met; the amino acid at position 410 is Gly, Ile, Val, Ala or Leu; the amino acid at position 414 is Ala, Gly, Asp or Glu; the amino acid at position 416 is Ser, Asn, Thr, Gln, Glu or Asp; the amino acid at position 417 is Ser, Arg, Lys, Thr, Ala or Gly; the amino acid at position 423 is Lys, Arg, Asn or Gln; the amino acid at position 431 is Arg or Lys; the amino acid at position 432 is Gln, Asn, Asp or Glu; the amino acid at position 436 is Arg, Lys, Asp or Glu; the amino acid at position 440 is Asn, Gln, Lys or Arg; the amino acid at position 442 is Leu, Ile or Val; the amino acid at position 447 is Ser, Lys, Thr or Arg; the amino acid at position 448 is Ala, Gly, Thr or Ser; the amino acid at position 451 is Gln, Asn or Met; the amino acid at position 453 is Gly or Ala; the amino acid at position 455 is Ala, Leu, Ile or Val; the amino acid at position 457 is Leu, Ile or Val; the amino acid at position 467 is Val, lie, Leu, Gly or Ala; the amino acid at position 471 is Gly or Ala; the amino acid at position 475 is Ser, Thr, Gln or Asn; the amino acid at position 483 is Gly or Ala; the amino acid at position 493 is Gln, Asn or Gly; the amino acid at position 504 is Val, Leu or lie; the amino acid at position 506 is Asp, Glu or His; the amino acid at position 509 is Asp, Glu, Gln or Asn; the amino acid at position 510 is Ser, Thr, Gly or Ala; the amino acid at position 512 is Glu or Asp; the amino acid at position 515 is Gly, Ala, Thr or Ser; the amino acid at position 516 is Gln, Asn or His; the amino acid at position 517 is lie, Val or Leu; the amino acid at position 519 is Asp, Asn, Glu, Gly or Gln; the amino acid at position 522 is Val, Glu, Pro, lie, Leu or Asp; the amino acid at position 525 is Glu or Asp; the amino acid at position 526 is Leu, lie, Val or Met; the amino acid at position 539 is Val, Leu or lie; the amino acid at position 555 is Val, Leu, Ile or Ala; the amino acid at position 557 is Arg or Lys; the amino acid at position 563 is Val, Leu, Ile or Met; the amino acid at position 571 is Ser, Thr or Cys; the amino acid at position 575 is Val, Leu, lie, Asp or Glu; the amino acid at position 577 is Met, Leu, Val or lie; the amino acid at position 579 is Glu, Asp, Asn or Gln; the amino acid at position 583 is Asp or Glu; the amino acid at position 589 is Met, lie, Val or Leu; the amino acid at position 590 is Met, lie, Val or Leu; the amino acid at position 593 is Met, Leu, Val or lie; the amino acid at position 595 is Arg, Lys, Asn or Gln; the amino acid at position 596 is Ser or Thr; the amino acid at position 597 is Gln, Asn or His; the amino acid at position 607 is Ala, Gly, lie, Leu or Val; the amino acid at position 608 is Asp, Glu, Gln or Asn; the amino acid at position 612 is Tyr, His or Phe; the amino acid at position 617 is Thr, Ser, Leu, Val or lie; the amino acid at position 618 is Gln, Asn or His; the amino acid at position 625 is Arg, Lys, Thr or Ser; the amino acid at position 626 is Met, Leu, Val or lie; the amino acid at position 628 is Leu, Val or lie; the amino acid at position 633 is lie, Leu, Val or Met; the amino acid at position 634 is Leu, lie, Val or Met; the amino acid at position 642 is Arg, Lys or Met; the amino acid at position 648 is Met, Ser or Thr; the amino acid at position 651 is Glu, Asp, Asn or Gln; the amino acid at position 654 is Thr, Val, Ser, lie, Leu, Gly or Ala; the amino acid at position 658 is Gly, Lys, Ala or Arg; the amino acid at position 663 is Gly or Ala; the amino acid at position 664 is Asp, Glu, Gln or Asn; the amino acid at position 668 is Ala, Gly, Ser or Thr; the amino acid at position 669 is Gln, Asn or His; the amino acid at position 671 is Asn, Gln, Thr or Ser the amino acid at position 675 is lie, Val, lie, Thr or Ser; the amino acid at position 678 is Met, lie, Ala, Leu, Ser or Thr; the amino acid at position 682 is Pro, Asn or Gln; the amino acid at position 683 is Ser, Thr or Pro; the amino acid at position 685 is Asp, Glu, Asp or Asn; the amino acid at position 694 is Asp, Glu, Ala or Gly; the amino acid at position 697 is Asn, Gln, Thr or Ser; the amino acid at position 704 is Glu, Asp, Ala or Gly; the amino acid at position 714 is Ala or Gly; the amino acid at position 721 is Ser, Thr or Phe; the amino acid at position 722 is Ser, Thr, Gln or Asn; the amino acid at position 724 is Ser or Thr; the amino acid at position 734 is His, Asn or Gln; the amino acid at position 736 is Val, Leu, Ile or Ala; the amino acid at position 737 is Lys, Arg, Asn or Gln; the amino acid at position 739 is Ala, Gly, Thr or Ser; the amino acid at position 740 is Ser, Thr or Met; the amino acid at position 741 is Gly, Ala, Gln or Asn; the amino acid at position 742 is lie, Leu, Val, Ala or Gly; the amino acid at position 743 is Gly or deleted; the amino acid at position 745 is Gly, Ala, Glu or Asp; the amino acid at position 751 is Thr, Ser, Gly or Ala; the amino acid at position 753 is Gln, Asn, Lys or Arg; the amino acid at position 754 is Thr or Ser; the amino acid at position 756 is Thr, Ser, Leu, Val or lie; the amino acid at position 757 is Val, Leu or lie; the amino acid at position 766 is lie, Leu or Val; the amino acid at position 773 is Asp or Glu; the amino acid at position 774 is Gln, Asn, Asp or Glu; the amino acid at position 776 is Leu, lie, Val or Met; the amino acid at position 777 is Pro, Ser or Thr; the amino acid at position 782 is Ala, Asp, Glu, lie, Leu or Val; the amino acid at position 786 is Tyr or Phe; the amino acid at position 787 is His, Asn or Gln; the amino acid at position 788 is Tyr or Met; the amino acid at position 789 is Ala, Lys or Arg; the amino acid at position 790 is Tyr or Thr; the amino acid at position 791 is Arg, Lys, Gly or Ala; the amino acid at position 792 is Leu, lie, Val, Thr or Ser; the amino acid at position 796 is Asp or Glu; the amino acid at position 797 is Ser, Thr or Ala the amino acid at position 802 is Glu, Lys, Asp, Asn or Gln; the amino acid at position 806 is Gln, Asp, Glu, Asn or His; the amino acid at position 810 is Lys, Arg or Thr; the amino acid at position 819 is Arg, Lys or His; the amino acid at position 829 is Lys, Ser, Ala or Pro; the amino acid at position 832 is Ala, Lys, Arg, Asp or Glu; the amino acid at position 833 is Gly, Ala, Asp or Glu; the amino acid at position 842 is Leu, lie, Val or Pro; the amino acid at position 847 is Gln, Asn, Asp or Glu; the amino acid at position 848 is lie, Leu or Val; the amino acid at position 849 is Val, Leu, lie, Gly or Ala; the amino acid at position 855 is Thr, Ser or Met; the amino acid at position 860 is lie, Leu or Val; the amino acid at position 864 is His, Asn or Gln; In some embodiments the nucleic acid molecule encodes a PtIP-83 polypeptide variant of SEQ ID NO: 1, wherein the amino acid at position 1 is Met or deleted; the amino acid at position 2 is Ala or deleted; the amino acid at position 3 is Leu, Val, Ile or deleted; the amino acid at position 4 is Val, Met, Ile or Leu; the amino acid at position 7 is Gly, Thr or Ser; the amino acid at position 8 is Lys, Arg, Ser or Thr; the amino acid at position 10 is Phe, Trp or Tyr; the amino acid at position 11 is Glu, Asp, Lys or Arg; the amino acid at position 18 is Met, Val, Leu or lie; the amino acid at position 19 is Gly, Pro or Ala; the amino acid at position 20 is Val, lie, Leu or deleted; the amino acid at position 21 is Leu, Ile or Val; the amino acid at position 23 is Arg, Lys, Asn or Gln; the amino acid at position 37 is Val, Ile or Leu; the amino acid at position 38 is Arg, Lys, Gln or Asn; the amino acid at position 40 is Ala, Gly, Thr or Ser; the amino acid at position 43 is Asn, Gln, Glu or Asp; the amino acid at position 45 is Gly or Ala; the amino acid at position 46 is Gln, Asp, Asn or Glu; the amino acid at position 48 is Glu, Asp, Pro, lie, Leu or Val; the amino acid at position 51 is Glu, Asp, Ala or Gly; the amino acid at position 52 is Lys, Arg, Ser or Thr; the amino acid at position 53 is Val, Ala, Cys or Thr; the amino acid at position 54 is Lys, Ala, Cys, Asp, Glu, Gly, His, lie, Leu, Met, Asn, Gln, Arg, Ser or Thr; the amino acid at position 55 is Arg, Ala, Asp, Glu, Phe, Gly, His, Lys, Leu, Met, Asn, Gln, Ser, Thr, Val, Trp or Tyr; the amino acid at position 56 is Leu, Glu, Phe, lie, Met, Thr or Val; the amino acid at position 57 is Tyr, Cys, lie, Leu, Met, Thr or Val; the amino acid at position 58 is Val, Cys, Ile or Leu; the amino acid at position 59 is Phe, Leu, Met, Val or Tyr; the amino acid at position 60 is Ala, Cys, Gly, Ser, Thr or Val; the amino acid at position 61 is Asp, Glu, His or Ser; the amino acid at position 62 is Val, Ala, Cys, lie, Leu or Thr; the amino acid at position 63 is Val, Ala, Cys, lie, Leu, Met or Thr; the amino acid at position 64 is Glu, Ala, Cys, Phe, Gly, His, lie, Leu, Met, Asn, Gln, Arg, Ser, Thr, Val, Trp or Tyr; the amino acid at position 65 is Leu, Ala, Cys, Phe, His, lie, Met, Asn, Gln, Thr, Val or Trp; the amino acid at position 66 is Pro, Asp, Gly, Met, Gln or Arg; the amino acid at position 67 is Val, Pro, lie, Leu, Ser or Thr; the amino acid at position 68 is Val, Arg, Phe, lie, Leu, Lys or Gly; the amino acid at position 69 is Glu, Ala, Asp, Gly, Arg or Lys; the amino acid at position 70 is Trp, Thr, His, Tyr, Lys or Arg; the amino acid at position 71 is Arg, Pro, Lys or deleted; the amino acid at position 72 is Trp, Asp, Leu, lie, Val, Glu or deleted; the amino acid at position 73 is Pro, Gln, Asn, His or deleted; the amino acid at position 74 is Pro, Met, Ser or Thr; the amino acid at position 75 is Gln, His, Asn, Lys or Arg; the amino acid at position 76 is lie, Met, Val or Leu; the amino acid at position 84 is lie, Leu or Val; the amino acid at position 91 is Trp or Phe; the amino acid at position 93 is Thr, Ser, Leu, Val or lie; the amino acid at position 94 is Asp, Glu, Ala or Gly; the amino acid at position 96 is Arg, Lys, Thr or Ser; the amino acid at position 97 is Gln, Phe, Asn, Lys or Arg; the amino acid at position 98 is Ser, Thr or deleted; the amino acid at position 99 is Asp, Glu, Gly or Ala; the amino acid at position 100 is Thr, Ser, Gly or Ala; the amino acid at position 101 is Glu, Thr, Asp, Ser or Trp the amino acid at position 103 is His, Arg, Lys, Glu or Gln; the amino acid at position 105 is Thr, Ser or Pro; the amino acid at position 108 is Lys, Arg, Asn, Asp, Gln or Glu; the amino acid at position 109 is Leu, Ile or Val; the amino acid at position 111 is Ala, Ser or Thr; the amino acid at position 112 is lie, Arg, Thr, Leu, Val, Lys, Ser or deleted; the amino acid at position 113 is Gln, Ala, Gly, Asn or deleted; the amino acid at position 114 is Arg, Glu, Lys, Asp or lie; the amino acid at position 115 is Glu, Asp, Asn or Gln; the amino acid at position 116 is Glu, Asn, Gln, Asp, Lys or Arg; the amino acid at position 117 is Asn, Val, Tyr, lie, Leu, Gln, Trp or Phe; the amino acid at position 118 is Arg or Lys; the amino acid at position 119 is Trp, Thr or Ser; the amino acid at position 122 is Thr, Lys, Ser, Arg or Ala; the amino acid at position 124 is Ala, Gly, Ser or Thr; the amino acid at position 126 is Gly, Ala, Glu or Asp; the amino acid at position 127 is Met, Gly or Ala; the amino acid at position 128 is Asn, Gln, Arg or Lys; the amino acid at position 131 is Val, lie, Leu, Ser or Thr; the amino acid at position 133 is lie, Leu or Val; the amino acid at position 134 is His or Tyr; the amino acid at position 135 is Ala or Gly; the amino acid at position 137 is Glu, Asp, Arg or Lys; the amino acid at position 139 is Gln, Asn, Asp or Glu; the amino acid at position 140 is Val, Arg, lie, Lys or Leu; the amino acid at position 141 is Gly, Ala, Thr or Ser; the amino acid at position 142 is Val, lie, Leu or Pro; the amino acid at position 144 is Thr, Leu, Phe, lie, Val or Tyr; the amino acid at position 145 is Met, Pro, Gln or Asn; the amino acid at position 146 is Ser, Gly, Thr, Ala, Gln or Asn; the amino acid at position 147 is Trp, Gln, Tyr or Asn; the amino acid at position 148 is Ser, Ala, Thr, Gly or Pro; the amino acid at position 149 is Ser, Thr or deleted; the amino acid at position 150 is Val, lie, Leu or Tyr; the amino acid at position 152 is Arg, Ala, Val, lie, Leu, Lys or Gly; the amino acid at position 154 is Ser, Trp, Thr, Asp or Glu; the amino acid at position 156 is Leu, Asp, lie, Val, Asn, Glu or Gln; the amino acid at position 158 is Ser, Thr or Cys; the amino acid at position 159 is Val, Thr, Leu or lie; the amino acid at position 162 is Ser, Thr, Gly or Ala; the amino acid at position 163 is Gly, Ala or deleted; the amino acid at position 164 is Phe or deleted; the amino acid at position 165 is Arg, Lys, Gly or Ala; the amino acid at position 166 is Ala, Arg, Met, Lys or Phe; the amino acid at position 167 is Val, lie, Leu or His; the amino acid at position 168 is Ser, Thr, Gln or Asn; the amino acid at position 169 is Val, His, lie, Leu, Ser or Thr; the amino acid at position 170 is Phe, lie, Leu or Val; the amino acid at position 171 is Glu, Asn, Gln or Asp; the amino acid at position 172 is Val, Ala, Arg, lie, Leu, Gly, Lys, Asp or Glu; the amino acid at position 175 is Ser, Arg, Thr, Lys or Trp; the amino acid at position 176 is Val, Leu or lie; the amino acid at position 177 is Arg, Lys, Leu, Val or lie; the amino acid at position 179 is Thr, lie, Val, Leu or Ser; the amino acid at position 180 is Leu, Phe, lie, Val, Ser or Thr; the amino acid at position 181 is Gly, Thr, Gln, Asn or Ser; the amino acid at position 182 is Ala, Leu, Phe, Val or lie; the amino acid at position 183 is Thr, Ser, Ala or Gly; the amino acid at position 184 is Leu, Thr, Ser, lie, Val, Lys or Arg; the amino acid at position 185 is Arg, Gly, Asp, Lys, Glu or Ala; the amino acid at position 186 is Pro, Val, lie, Leu, Asn or Gln; the amino acid at position 187 is Asp, Thr, Glu or Ser; the amino acid at position 188 is His, Gly or Ala; the amino acid at position 189 is Ala, Arg, Pro, Lys, Gly or deleted; the amino acid at position 190 is Leu, Asn, Ile, Val, Gln or deleted; the amino acid at position 191 is Tyr or deleted; the amino acid at position 192 is Ser, lie, Val, Leu, Thr or Asn; the amino acid at position 193 is Thr, Ser, Glu or Asp; the amino acid at position 194 is Thr or Ser; the amino acid at position 195 is Met or Thr; the amino acid at position 196 is Gln, His, Leu, Asn, lie, Val, Thr or Ser; the amino acid at position 197 is Ala, Gly, lie, Val or Leu; the amino acid at position 198 is Thr, Glu, Ser, Asp, Gly or Ala; the amino acid at position 199 is Pro, Lys or Arg; the amino acid at position 200 is Asn, Ser, Thr, Gln, Ala or Gly; the amino acid at position 201 is Ala, Leu, Glu, lie, Asp or Trp; the amino acid at position 202 is Ser, Asp, Phe, lie, Val, Thr, Glu or Leu; the amino acid at position 203 is His, Pro, Gly, Ala, Thr or Ser; the amino acid at position 204 is lie, Trp, His, Leu, Val, Ala or Gly; the amino acid at position 205 is Ser, Asn, Leu, Val, Thr, Gln or lie; the amino acid at position 206 is Ala, Gly, Asp, Tyr, Glu, Lys or Arg; the amino acid at position 207 is Phe, Val, Ile or Leu; the amino acid at position 208 is Asn, Ser, Pro, Gln, Thr, Val, Ile or Leu; the amino acid at position 210 is Arg, Asp, Glu, Lys, Ser or Tyr; the amino acid at position 211 is lie, Ser, Leu, Val or Thr; the amino acid at position 212 is Val, Ala, lie, Leu, Glu, Gly or Asp; the amino acid at position 214 is Pro, Lys or Arg; the amino acid at position 215 is Ser or Thr; the amino acid at position 217 is Tyr or Phe; the amino acid at position 218 is Arg, Lys, Thr or Ser; the amino acid at position 219 is Val, lie, Leu or Ala; the amino acid at position 220 is Cys, Leu, lie, Val, Thr or Ser; the amino acid at position 221 is Pro or His; the amino acid at position 222 is Leu, Arg, Lys, lie, Val, Thr or Ser; the amino acid at position 224 is Asn, Gln, Thr or Ser; the amino acid at position 225 is Asp, Arg, Glu, Lys, Ser or Thr; the amino acid at position 226 is Thr, Ser, Gln or Asn; the amino acid at position 227 is Asp, Leu, Glu, lie, Val or deleted; the amino acid at position 228 is Thr, Ser or deleted; the amino acid at position 229 is Tyr or deleted; the amino acid at position 230 is Leu, lie, Val or deleted; the amino acid at position 231 is Gly, Ala or deleted; the amino acid at position 232 is lie, Leu, Val or deleted; the amino acid at position 233 is Pro or deleted; the amino acid at position 234 is Ala, Pro, Gly or deleted; the amino acid at position 235 is Asp, lie, Leu, Glu or Val; the amino acid at position 236 is Val, Ser, lie, Leu, Thr, Asp or Glu; the amino acid at position 237 is Ala, Phe or Tyr; the amino acid at position 238 is Ala, Gly, Ser or Thr; the amino acid at position 239 is Val, Ser, lie, Leu, Thr, Ala or Gly; the amino acid at position 240 is Leu, Val or lie; the amino acid at position 243 is Asp or Glu; the amino acid at position 249 is Asn, Gln, Thr or Ser; the amino acid at position 252 is Leu, lie, Val or Met; the amino acid at position 257 is Thr or Ser; the amino acid at position 259 is His, lie, Val or Leu; the amino acid at position 266 is Ala, lie, Leu or Val; the amino acid at position 267 is Cys, Ala or Gly; the amino acid at position 268 is His, Arg, Lys or Tyr; the amino acid at position 272 is Asp or Glu; the amino acid at position 273 is Val, Met, Ile or Leu; the amino acid at position 274 is Val, lie, Leu or Met; the amino acid at position 278 is Gly or Ala; the amino acid at position 279 is Glu, Asp, Gly or Val; the amino acid at position 281 is Leu, lie, Val, Gly or Ala; the amino acid at position 282 is Asn, Leu or lie; the amino acid at position 285 is Asn, Gln, Thr or Ser; the amino acid at position 286 is Lys, Asp, Arg or Glu; the amino acid at position 287 is Leu, Ile or Val; the amino acid at position 290 is Pro, Gln, Asn, Lys or Arg; the amino acid at position 291 is Leu, Ile or Val; the amino acid at position 292 is Lys, Arg, lie, Leu or Val; the amino acid at position 293 is Glu, Asp, Asn or Gln; the amino acid at position 294 is Ser, Asn, Thr, Gln, Arg or Lys; the amino acid at position 295 is Thr or Ser; the amino acid at position 296 is Gln, Asn or His; the amino acid at position 297 is Leu, lie, Val or Met; the amino acid at position 300 is Ser or Thr; the amino acid at position 301 is Glu, Asp, Gly or Ala; the amino acid at position 302 is Ser, Pro, Thr, Gly or Ala; the amino acid at position 304 is Lys, Arg, Gln or Asn; the amino acid at position 313 is Val, Leu or lie; the amino acid at position 314 is His, Glu, Asn, Asp or Gln; the amino acid at position 315 is Ala, Cys, Gly, Thr or Ser; the amino acid at position 316 is Ala, lie, Leu or Val; the amino acid at position 317 is Met, Leu, Val or lie; the amino acid at position 319 is Met, Leu, Val or lie; the amino acid at position 320 is Val, lie, Leu, Ala or Gly; the amino acid at position 321 is Arg, Lys or Pro; the amino acid at position 322 is lie, Leu, Val or Phe; the amino acid at position 323 is Gly, lie, Leu or Val; the amino acid at position 324 is Leu, lie, Val, Thr or Ser; the amino acid at position 336 is Ser, Thr, Gln or Asn; the amino acid at position 339 is Asn, Lys, Gln or Arg; the amino acid at position 350 is Arg, Lys, Asn or Gln; the amino acid at position 351 is Glu or Asp; the amino acid at position 353 is Lys or Arg; the amino acid at position 354 is Gln, Asn, Lys or Arg; the amino acid at position 355 is Phe, lie, Leu or Leu; the amino acid at position 356 is Lys or Arg; the amino acid at position 360 is lie, Val, Leu, Gly or Ala; the amino acid at position 363 is Gln, Ala, Cys, Glu, Phe, Gly, His, Lys, Leu, Asn, Arg, Ser, Thr, Val or Trp; the amino acid at position 364 is lie, Ala, Cys, Glu, Phe, His, Lys, Leu, Met, Asn, Gln, Ser, Thr, Val, Trp or Tyr; the amino acid at position 365 is Leu, Ala, Glu, Phe, Gly, His, lie, Lys, Met, Asn, Arg, Val, Trp or Tyr; the amino acid at position 366 is Gly, Ala, Cys, Phe, His, lie, Lys, Leu, Met, Asn, Ser, Thr or Val; the amino acid at position 367 is Ser, Ala, Cys, Asp, Glu, Phe, Gly, His, lie, Leu, Met, Asn, Pro, Gln, Arg, Thr, Val or Trp; the amino acid at position 368 is Tyr, Ala, Cys, Asp, Glu, Phe, Gly, His, lie, Lys, Leu, Met, Asn, Pro, Gln, Arg, Ser, Thr, Val or Trp; the amino acid at position 369 is Leu, Ala, Cys, Asp, Phe, Gly, lie, Met, Thr or Val; the amino acid at position 370 is Leu, Ala, Cys, Asp, Glu, Phe, Gly, His, lie, Lys, Met, Gln, Arg, Ser, Thr, Val, Trp or Tyr; the amino acid at position 371 is Gln, Ala, Cys, Asp, Glu, Phe, Gly, Ile, Lys, Leu, Asn, Arg, Ser, Thr, Val or Trp; the amino acid at position 372 is Gln, Ala, Cys, Asp, Phe, Gly, His, lie, Leu, Asn, Arg, Ser, Val or Tyr; the amino acid at position 373 is Asn, Ala, Cys, Asp, Phe, Gly, His, lie, Lys, Gln, Ser, Thr, Val or Trp; the amino acid at position 374 is Arg or Lys; the amino acid at position 376 is Phe, lie, Val or Leu; the amino acid at position 378 is Glu or Asp; the amino acid at position 381 is Leu, Ile or Val; the amino acid at position 388 is Ala, Thr, Gly or Ser; the amino acid at position 395 is Arg or Lys; the amino acid at position 396 is Glu, Gln, Asp, Asn, Ala or Gly; the amino acid at position 399 is Asp, Gln, Glu or Asn; the amino acid at position 400 is Asn, Thr, Ser, Glu, Gln or Asp; the amino acid at position 401 is Thr, Ser, Gly or Ala; the amino acid at position 402 is Phe, lie, Val or Leu; the amino acid at position 406 is Asp or Glu; the amino acid at position 408 is Leu, lie, Val or Met; the amino acid at position 410 is Gly, lie, Val, Ala or Leu; the amino acid at position 414 is Ala, Gly, Asp or Glu; the amino acid at position 416 is Ser, Asn, Thr, Gln, Glu or Asp; the amino acid at position 417 is Ser, Arg, Lys, Thr, Ala or Gly; the amino acid at position 423 is Lys, Arg, Asn or Gln; the amino acid at position 431 is Arg or Lys; the amino acid at position 432 is Gln, Asn, Asp or Glu; the amino acid at position 436 is Arg, Lys, Asp or Glu; the amino acid at position 440 is Asn, Gln, Lys or Arg; the amino acid at position 442 is Leu, Ile or Val; the amino acid at position 447 is Ser, Lys, Thr or Arg; the amino acid at position 448 is Ala, Gly, Thr or Ser; the amino acid at position 451 is Gln, Asn or Met; the amino acid at position 453 is Gly or Ala; the amino acid at position 455 is Ala, Leu, Ile or Val; the amino acid at position 457 is Leu, Ile or Val; the amino acid at position 467 is Val, lie, Leu, Gly or Ala; the amino acid at position 471 is Gly or Ala; the amino acid at position 475 is Ser, Thr, Gln or Asn; the amino acid at position 483 is Gly or Ala; the amino acid at position 493 is Gln, Asn or Gly; the amino acid at position 504 is Val, Leu or lie; the amino acid at position 506 is Asp, Glu or His; the amino acid at position 509 is Asp, Glu, Gln or Asn; the amino acid at position 510 is Ser, Thr, Gly or Ala; the amino acid at position 512 is Glu or Asp; the amino acid at position 515 is Gly, Ala, Thr or Ser; the amino acid at position 516 is Gln, Asn or His; the amino acid at position 517 is lie, Val or Leu; the amino acid at position 519 is Asp, Asn, Glu, Gly or Gln; the amino acid at position 522 is Val, Glu, Pro, lie, Leu or Asp; the amino acid at position 525 is Glu or Asp; the amino acid at position 526 is Leu, lie, Val or Met; the amino acid at position 539 is Val, Leu or lie; the amino acid at position 555 is Val, Leu, Ile or Ala; the amino acid at position 556 is Trp, Phe, Thr or Tyr; the amino acid at position 557 is Arg, Cys, Asp, Gly, His, lie, Lys, Leu, Met, Asn, Pro, Gln, Ser, Thr, Val, Trp or Tyr; the amino acid at position 558 is Ala, Cys, Asp, Phe, Gly, His, Ile, Lys, Leu, Asn, Pro, Gln, Arg, Ser, Val, Trp or Tyr; the amino acid at position 559 is Lys, Ala, Cys, Phe, Gly, His, Ile, Leu, Asn, Gln, Arg, Ser, Thr, Val or Tyr; the amino acid at position 560 is Cys, Ala, Phe, Gly, Ile, Met, Asn, Arg, Ser, Thr or Val; the amino acid at position 561 is Lys, Ala, Cys, Asp, Glu, Phe, Gly, His, Ile, Leu, Met, Asn, Arg, Ser, Thr, Val or Tyr; the amino acid at position 562 is Asn, Cys, Asp, Glu, Gly, His, Leu, Met, Arg, Ser, Thr, Val or Tyr; the amino acid at position 563 is Val, Ala, Cys, Asp, Phe, His, Ile, Leu, Met, Asn, Gln, Thr or Trp; the amino acid at position 564 is Ala, Cys, Gly, Met, Gln, Ser, Thr, Val, Trp or Tyr; the amino acid at position 571 is Ser, Thr or Cys; the amino acid at position 575 is Val, Leu, Ile, Asp or Glu; the amino acid at position 577 is Met, Leu, Val or Ile; the amino acid at position 579 is Glu, Asp, Asn or Gln; the amino acid at position 583 is Asp or Glu; the amino acid at position 589 is Met, Ile, Val or Leu; the amino acid at position 590 is Met, Ile, Val or Leu; the amino acid at position 593 is Met, Leu, Val or Ile; the amino acid at position 595 is Arg, Lys, Asn or Gln; the amino acid at position 596 is Ser or Thr; the amino acid at position 597 is Gln, Asn or His; the amino acid at position 607 is Ala, Gly, Ile, Leu or Val; the amino acid at position 608 is Asp, Glu, Gln or Asn; the amino acid at position 612 is Tyr, His or Phe; the amino acid at position 617 is Thr, Ser, Leu, Val or Ile; the amino acid at position 618 is Gln, Asn or His; the amino acid at position 625 is Arg, Lys, Thr or Ser; the amino acid at position 626 is Met, Leu, Val or Ile; the amino acid at position 628 is Leu, Val or Ile; the amino acid at position 633 is Ile, Leu, Val or Met; the amino acid at position 634 is Leu, Ile, Val or Met; the amino acid at position 642 is Arg, Lys or Met; the amino acid at position 646 is Leu, Ala, Cys, Gly, Ile, Met, Asn, Gln, Ser, Thr or Val; the amino acid at position 647 is Leu, Asp, Gly, Met, Asn, Gln or Thr; the amino acid at position 648 is Met, Ala, Cys, Asp, Glu, Phe, Gly, His, Lys, Leu, Asn, Pro, Gln, Arg, Ser, Thr, Val, Trp or Tyr; the amino acid at position 649 is Pro, Ala, Cys, Asp, Glu, Phe, Gly, His, Lys, Met, Asn, Gln, Arg, Ser, Thr, Trp or Tyr; the amino acid at position 650 is Thr, Ala, Cys, Asp, Phe, Gly, His, Ile, Lys, Leu, Met, Pro, Gln, Arg, Ser, Val or Tyr; the amino acid at position 651 is Glu, Ala, Cys, Asp, Gly, His, Ile, Leu, Met, Asn, Pro, Gln, Arg, Ser, Thr, Val or Tyr; the amino acid at position 652 is Leu, Cys, Phe, Ile, Lys, Met, Pro, Arg, Ser, Thr or Val; the amino acid at position 653 is Thr, Cys, Asp, Glu, Phe, Gly, His, Ile, Lys, Leu, Pro, Arg, Ser, Val or Trp; the amino acid at position 654 is Thr, Ala, Cys, Phe, Ile, Lys, Leu, Met, Pro, Arg, Ser, Val, Trp or Tyr; the amino acid at position 655 is Trp, Phe or Tyr; the amino acid at position 658 is Gly, Lys, Ala or Arg; the amino acid at position 663 is Gly or Ala; the amino acid at position 664 is Asp, Glu, Gln or Asn; the amino acid at position 668 is Ala, Gly, Ser or Thr; the amino acid at position 669 is Gln, Asn or His; the amino acid at position 671 is Asn, Gln, Thr or Ser the amino acid at position 675 is lie, Val, lie, Thr or Ser; the amino acid at position 678 is Met, lie, Ala, Leu, Ser or Thr; the amino acid at position 682 is Pro, Asn or Gln; the amino acid at position 683 is Ser, Thr or Pro; the amino acid at position 685 is Asp, Glu, Asp or Asn; the amino acid at position 694 is Asp, Glu, Ala or Gly; the amino acid at position 697 is Asn, Gln, Thr or Ser; the amino acid at position 704 is Glu, Asp, Ala or Gly; the amino acid at position 714 is Ala or Gly; the amino acid at position 721 is Ser, Thr or Phe; the amino acid at position 722 is Ser, Thr, Gln or Asn; the amino acid at position 724 is Ser or Thr; the amino acid at position 734 is His, Asn or Gln; the amino acid at position 736 is Val, Leu, Ile or Ala; the amino acid at position 737 is Lys, Arg, Asn or Gln; the amino acid at position 739 is Ala, Gly, Thr or Ser; the amino acid at position 740 is Ser, Thr or Met; the amino acid at position 741 is Gly, Ala, Gln or Asn; the amino acid at position 742 is lie, Leu, Val, Ala or Gly; the amino acid at position 743 is Gly or deleted; the amino acid at position 745 is Gly, Ala, Glu or Asp; the amino acid at position 751 is Thr, Ser, Gly or Ala; the amino acid at position 753 is Gln, Asn, Lys or Arg; the amino acid at position 754 is Thr or Ser; the amino acid at position 756 is Thr, Ser, Leu, Val or lie; the amino acid at position 757 is Val, Leu or lie; the amino acid at position 766 is lie, Leu or Val; the amino acid at position 771 is Arg, Ala, Asp, Glu, Phe, Gly, His, lie, Lys, Leu, Asn, Ser, Thr, Val, Trp or Tyr; the amino acid at position 772 is Arg, Ala, Cys, Asp, Glu, Phe, Gly, His, lie, Lys, Leu, Met, Pro, Gln, Ser, Thr, Val, Trp or Tyr; the amino acid at position 773 is Asp, Ala, Glu, Phe, Gly, His, lie, Lys, Leu, Met, Asn, Gln, Arg, Ser, Thr, Val, Trp or Tyr; the amino acid at position 774 is Gln, Ala, Asp, Gly, His, lie, Lys, Leu, Met, Asn, Pro, Arg, Ser, Thr, Val, Trp or Tyr; the amino acid at position 775 is Val, Ala, Cys, Asp, Glu, Gly, His, lie, Asn, Pro, Gln, Arg, Ser, Thr or Tyr; the amino acid at position 776 is Leu, Ala, Cys, Asp, Glu, Phe, Gly, His, lie, Lys, Asn, Pro, Gln, Arg, Ser, Thr, Val or Tyr; the amino acid at position 777 is Pro, Ala, Cys, Asp, Glu, Phe, Gly, His, Lys, Leu, Met, Asn, Gln, Ser, Thr, Val, Trp or Tyr; the amino acid at position 778 is Phe, Ala, His, lie, Leu, Met, Asn, Gln, Ser, Val, Trp or Tyr; the amino acid at position 779 is Gln, Ala, Cys, Asp, Glu, Gly, His, Lys, Leu, Asn, Pro, Arg, Ser, Thr or Val; the amino acid at position 780 is Ala, Cys, Asn, Pro, Gln or Ser; the amino acid at position 781 is Ala, Cys, Asp, Glu, Phe, Gly, His, lie, Asn, Gln, Arg, Ser, Thr, Val, Trp or Tyr; the amino acid at position 782 is Ala, Cys, Asp, Glu, Phe, Gly, His, lie, Lys, Met, Pro, Gln, Arg, Ser, Thr, Val, Trp or Tyr; the amino acid at position 783 is Pro, Ala, Cys, Asp, Glu, Gly, His, Asn, Gln, Arg, Ser, Thr or Val; the amino acid at position 784 is Leu, Ala, Glu, Phe, His, lie, Lys, Met, Asn, Pro, Gln, Ser, Thr, Val or Trp; the amino acid at position 785 is Asn, Ala, Cys, Glu, Phe, Gly, His, lie, Lys, Leu, Met, Gln, Arg, Ser, Thr, Val, Trp or Tyr; the amino acid at position 786 is Tyr, Phe, lie, Leu or Trp; the amino acid at position 787 is His, Asn or Gln; the amino acid at position 788 is Tyr or Met; the amino acid at position 789 is Ala, Lys or Arg; the amino acid at position 790 is Tyr or Thr; the amino acid at position 791 is Arg, Lys, Gly or Ala; the amino acid at position 792 is Leu, lie, Val, Thr or Ser; the amino acid at position 796 is Asp or Glu; the amino acid at position 797 is Ser, Thr or Ala the amino acid at position 802 is Glu, Lys, Asp, Asn or Gln; the amino acid at position 806 is Gln, Asp, Glu, Asn or His; the amino acid at position 810 is Lys, Arg or Thr; the amino acid at position 819 is Arg, Lys or His; the amino acid at position 829 is Lys, Ser, Ala or Pro; the amino acid at position 832 is Ala, Lys, Arg, Asp or Glu; the amino acid at position 833 is Gly, Ala, Asp or Glu; the amino acid at position 842 is Leu, lie, Val or Pro; the amino acid at position 847 is Gln, Asn, Asp or Glu; the amino acid at position 848 is lie, Leu or Val; the amino acid at position 849 is Val, Leu, lie, Gly or Ala; the amino acid at position 855 is Thr, Ser or Met; the amino acid at position 860 is lie, Leu or Val; and the amino acid at position 864 is His, Asn or Gln.

[0043] In some embodiments the nucleic acid molecule encoding the PtIP-83 polypeptide is derived from a fern species in the Division Pteridophyta. The phylogeny of ferns as used herein is based on the classification for extant ferns by A. R. Smith et al, TAXON, 55:705-731 (2006). The consensus phylogeny based on the classification by A. R. Smith is shown in FIG. 1. Other phylogenic classifications of extant ferns are known to one skilled in the art. Additional information on the phylogeny of ferns can be found at mobot.org/MOBOT/research/APweb/ (which can be accessed using the “www” prefix) and Schuettpelz E. and Pryer K. M., TAXON 56: 1037-1050 (2007) based on three plastid genes. Additional fern and other primitive plant species can be found at homepages.caverock.net.nz/-bj/fern/list.htm (which can be accessed using the http:// prefix).

[0044] In some embodiments the nucleic acid molecule encoding the PtIP-83 polypeptide is derived from a fern species in the Class Psilotopsida. In some embodiments the nucleic acid molecule encoding the PtIP-83 polypeptide is derived from a fern species in the Class Psilotopsida, Order Psilotales. In some embodiments the nucleic acid molecule encoding PtIP-83 polypeptide is derived from a fern species in the Class Psilotopsida, Order Ophioglossales. In some embodiments the nucleic acid molecule encoding the PtIP-83 polypeptide is derived from a fern species in the Class Psilotopsida, Order Ophioglossales, Family Psilotaceae. In some embodiments the nucleic acid molecule encoding the PtIP-83 polypeptide is derived from a fern species in the Class Psilotopsida, Order Ophioglossales Family Ophioglossaceae. In some embodiments the nucleic acid molecule encoding the PtIP-83 polypeptide is derived from a fern species in the Genus Ophioglossum L., Botrychium, Botrypus, Helminthostachys, Ophioderma, Cheiroglossa, Sceptridium or Mankyua.

[0045] In some embodiments the nucleic acid molecule encoding the PtIP-83 polypeptide is derived from a species in the Class Polypodiopsida/Pteridopsida. In some embodiments the nucleic acid molecule encoding the PtIP-83 polypeptide is derived from a fern species in the Order Osmundales (royal ferns); Family Osmundaceae. In some embodiments the nucleic acid molecule encoding the PtIP-83 polypeptide is derived from a fern species in the Order Hymenophyllales; Family Hymenophyllaceae. In some embodiments the nucleic acid molecule encoding the PtIP-83 polypeptide is derived from a fern species in the Order Gleicheniales; Family Gleicheniaceae, Family Dipteridaceae or Family Matoniaceae. In some embodiments the nucleic acid molecule encoding the PtIP-83 polypeptide is derived from a fern species in the Order Schizaeales; Family Lygodiaceae, Family Anemiaceae or Family Schizaeaceae. In some embodiments the nucleic acid encoding the PtIP-83 polypeptide is derived from a fern species in the Order Schizaeales; Family Schizaeaceae, Genus Lygodium selected from but not limited to Lygodium articulatum, Lygodium circinatum, Lygodium conforme, Lygodium cubense, Lygodium digitatum, Lygodium flexuosum, Lygodium heterodoxum, Lygodium japonicum, Lygodium kerstenii, Lygodium lanceolatum, Lygodium longifolium, Lygodium merrilii, Lygodium micans, Lygodium microphyllum, Lygodium microstachyum, Lygodium oligostachyum, Lygodium palmatum, Lygodium polystachyum, Lygodium radiatum, Lygodium reticulatum, Lygodium salicifolium, Lygodium scandens, Lygodium smithianum, Lygodium subareolatum, Lygodium trifurcatum, Lygodium venustum, Lygodium versteeghii, Lygodium volubile, and Lygodium yunnanense. In some embodiments the nucleic acid molecule encoding the PtIP-83 polypeptide is derived from a fern species in the Order Salviniales; Family Marsileaceae or Family Salviniaceae. In some embodiments the nucleic acid molecule encoding the PtIP-83 polypeptide is derived from a fern species in the Order Cyatheales; Family Thyrsopteridaceae, Family Loxsomataceae, Family Culcitaceae, Family Plagiogyriaceae, Family Cibotiaceae, Family Cyatheaceae, Family Dicksoniaceae or Family Metaxyaceae.

[0046] In some embodiments the nucleic acid molecule encoding the PtIP-83 polypeptide is derived from a fern species in the Order Polypodiales; Family Lindsaeaceae, Family Saccolomataceae, Family Cystodiaceae, Family Dennstaedtiaceae, Family Pteridaceae, Family Aspleniaceae, Family Thelypteridaceae, Family Woodsiaceae, Family Onocleaceae, Family Blechnaceae, Family Dryopteridaceae, Family Lomariopsidaceae, Family Tectariaceae, Family Oleandraceae, Family Davalliaceae or Family Polypodiaceae.

[0047] In some embodiments the nucleic acid molecule encoding the PtIP-83 polypeptide is derived from a fern species in the Order Polypodiales, Family Pteridaceae, Genus Adiantaceae selected from but not limited to Adiantum aethiopicum, Adiantum aleuticum, Adiantum bonatianum, Adiantum cajennense, Adiantum capillus-junonis, Adiantum capillus-veneris, Adiantum caudatum, Adiantum chienii, Adiantum chilense, Adiantum cuneatum, Adiantum cunninghamii, Adiantum davidii, Adiantum diaphanum, Adiantum edentulum, Adiantum edgeworthii, Adiantum excisum, Adiantum fengianum, Adiantum fimbriatum, Adiantum flabellulatum, Adiantum formosanum, Adiantum formosum, Adiantum fulvum, Adiantum gravesii, Adiantum hispidulum, Adiantum induratum, Adiantum jordanii, Adiantum juxtapositum, Adiantum latifolium, Adiantum leveillei, Adiantum lianxianense, Adiantum malesianum, Adiantum mariesii, Adiantum monochlamys, Adiantum myriosorum, Adiantum obliquum, Adiantum ogasawarense, Adiantum pedatum, Adiantum pentadactylon, Adiantum peruvianum, Adiantum philippense, Adiantum princeps, Adiantum pubescens, Adiantum raddianum, Adiantum reniforme, Adiantum roborowskii, Adiantum serratodentatum, Adiantum sinicum, Adiantum soboliferum, Adiantum subcordatum, Adiantum tenerum, Adiantum terminatum, Adiantum tetraphyllum, Adiantum trapeziforme, Adiantum venustum, Adiantum viridescens, and Adiantum viridimontanum.

[0048] In some embodiments the nucleic acid molecule encoding the PtIP-83 polypeptide is derived from a fern species in the Order Polypodiales, Family Aspleniaceae, Genus Asplenium.

[0049] In some embodiments the nucleic acid molecule encoding the PtIP-83 polypeptide is derived from a fern species in the Order Polypodiales, Family Aspleniaceae, Genus Aspleniuml selected from but not limited to Asplenium adiantum, Asplenium adulterinum, Asplenium aequibasis, Asplenium aethiopicum, Asplenium africanum, Asplenium x alternifolium, Asplenium angustum, Asplenium antiquum, Asplenium ascensionis, Asplenium attenuatum, Asplenium aureum, Asplenium auritum, Asplenium australasicum, Asplenium azoricum, Asplenium bifrons, Asplenium billottii, Asplenium bipinnatifidum, Asplenium brachycarpum, Asplenium bradleyi, Asplenium bulbiferum, Asplenium caudatum, Asplenium ceterach, Asplenium compressum, Asplenium congestum, Asplenium corderoanum, Asplenium crinicaule, Asplenium cristatum, Asplenium cuneifolium, Asplenium cymbifolium, Asplenium daghestanicum, Asplenium dalhousiae, Asplenium dareoides, Asplenium daucifolium, Asplenium difforme, Asplenium fissum, Asplenium dimorphum, Asplenium divaricatum, Asplenium dregeanum, Asplenium x ebenoides, Asplenium ecuadorense, Asplenium feei Kunze, Asplenium fissum, Asplenium flabellifolium, Asplenium flaccidum, Asplenium fontanum, Asplenium forisiense, Asplenium formosum, Asplenium gemmiferum, Asplenium x germanicum, Asplenium gueinzii, Asplenium goudeyi, Asplenium hemionitis, Asplenium hermannii-christii, Asplenium hookerianum, Asplenium hybridum, Asplenium incisum, Asplenium x jacksonii, Asplenium x kenzoi, Asplenium laciniatum, Asplenium lamprophyllum, Asplenium laserpitiifolium, Asplenium lepidum, Asplenium listeri, Asplenium longissimum, Asplenium lucidum, Asplenium lunulatum, Asplenium lyallii, Asplenium macedonicum, Asplenium majoricum, Asplenium marinum, Asplenium x microdon, Asplenium milnei, Asplenium montanum, Asplenium musifolium, Asplenium nidus, Asplenium normale, Asplenium obliquum, Asplenium oblongifolium, Asplenium obovatum, Asplenium obtusatum, Asplenium oligolepidum, Asplenium oligophlebium, Asplenium onopteris, Asplenium pacificum, Asplenium paleaceum, Asplenium palmeri, Asplenium petrarchae, Asplenium pinnatifidum, Asplenium planicaule, Asplenium platybasis, Asplenium platyneuron, Asplenium polyodon, Asplenium praemorsum, Asplenium prolongatum, Asplenium pteridoides, Asplenium resiliens, Asplenium rhizophyllum, Asplenium richardii, Asplenium ruprechtii, Asplenium ruta-muraria, Asplenium rustifolium, Asplenium sagittatum, Asplenium sandersonii, Asplenium x sarniense, Asplenium schizotrichum, Asplenium schweinfurthii, Asplenium scleroprium, Asplenium scolopendrium (syn. Phyllitis scolopendrium), Asplenium seelosii, Asplenium septentrionale, Asplenium septentrionale x trichomanes, Asplenium serra, Asplenium serratum, Asplenium sessilifolium, Asplenium shuttleworthianum, Asplenium simplicifrons, Asplenium splendens, Asplenium surrogatum, Asplenium tenerum, Asplenium terrestre, Asplenium theciferum, Asplenium thunbergii, Asplenium trichomanes, Asplenium tutwilerae, Asplenium vespertinum, Asplenium vieillardii, Asplenium virens, Asplenium viride, Asplenium vittiforme, and Asplenium viviparum.

[0050] In some embodiments the nucleic acid molecule encoding the PtIP-83 polypeptide is derived from a fern species in the Order Polypodiales, Family Blechnaceae, Genus Blecnum.

[0051] In some embodiments the nucleic acid molecule encoding the PtIP-83 polypeptide is derived from a fern species in the Order Polypodiales, Family Dryopteridaceae Genus Acrophorus, Genus Acrorumohra, Genus Anapausia, Genus Arachniodes, Genus Bolbitis, Genus Ctenitis, Genus Cyclodium, Genus Cyrtogonellum, Genus Cyrtomidictyum, Genus Cyrtomium, Genus Diacalpe, Genus Didymochlaena, Genus Dryopsis, Genus Dryopteris, Genus Elaphoglossum, Genus Hypodematium, Genus Lastreopsis, Genus Leptorumohra, Genus Leucostegia, Genus Lithostegia, Genus Lomagramma, Genus Maxonia, Genus Megalastrum, Genus Olfersia, Genus Peranema, Genus Phanerophlebia, Genus Phanerophlebiopsis, Genus Polybotrya, Genus Polystichopsis, Genus Polystichum, Genus Rumohra, Genus Sorolepidium, Genus Stigmatopteris or Genus Teratophyllum.

[0052] In some embodiments the nucleic acid molecule encoding the PtIP-83 polypeptide is derived from a fern species in the Order Polypodiales, Family Dryopteridaceae, Genus Polystichum. In some embodiments the nucleic acid molecule encoding the PtIP-83 polypeptide is derived from a fern species in the Order Polypodiales, Family Dryopteridaceae, Genus Polystichum selected from but not limited to Polystichum acanthophyllum, Polystichum acrostichoides, Polystichum aculeatum, Polystichum acutidens, Polystichum acutipinnulum, Polystichum alcicorne, Polystichum aleuticum, Polystichum andersonii, Polystichum atkinsonii, Polystichum australiense, Polystichum bakerianum, Polystichum biaristatum, Polystichum bomiense, Polystichum bonseyi, Polystichum brachypterum, Polystichum braunii, Polystichum brachypterum, Polystichum calderonense, Polystichum californicum, Polystichum capillipes, Polystichum castaneum, Polystichum chilense, Polystichum christii Ching, Polystichum chunii Ching, Polystichum craspedosorum, Polystichum cyclolobum, Polystichum cystostegia, Polystichum deltodon, Polystichum dielsii, Polystichum discretum, Polystichum drepanum, Polystichum dudleyi, Polystichum duthiei, Polystichum echinatum, Polystichum erosum, Polystichum excellens, Polystichum eximium, Polystichum falcatipinnum, Polystichum falcinellum, Polystichum fallax, Polystichum formosanum, Polystichum gongboense, Polystichum grandifrons, Polystichum gymnocarpium, Polystichum haleakalense, Polystichum hancockii, Polystichum hecatopteron, Polystichum herbaceum, Polystichum imbricans, Polystichum incongruum, Polystichum kruckebergii, Polystichum kwakiutlii, Polystichum lachenense, Polystichum lanceolatum, Polystichum lemmonii, Polystichum lentum, Polystichum lonchitis, Polystichum longidens, Polystichum longipaleatum, Polystichum longipes, Polystichum luctuosum, Polystichum macleae, Polystichum macrochlaenum, Polystichum makinoi, Polystichum martini, Polystichum mayebarae, Polystichum mediocre, Polystichum medogense, Polystichum microchlamys, Polystichum mohrioides, Polystichum mollissimum, Polystichum monticola, Polystichum moorei, Polystichum morii, Polystichum moupinense, Polystichum muricatum, Polystichum nakenense, Polystichum neolobatum, Polystichum nepalense, Polystichum ningshenense, Polystichum obliquum, Polystichum omeiense, Polystichum ordinatum, Polystichum orientalitibeticum, Polystichum paramoupinense, Polystichum parvipinnulum, Polystichum piceopaleaceum, Polystichum polyblepharum, Polystichum prescottianum, Polystichum prionolepis, Polystichum proliferum, Polystichum pseudocastaneum, Polystichum pseudomakinoi, Polystichum punctiferum, Polystichum pungens, Polystichum qamdoense, Polystichum retrosopaleaceum, Polystichum rhombiforme, Polystichum rhomboidea, Polystichum richardii, Polystichum rigens, Polystichum rotundilobum, Polystichum scopulinum, Polystichum semifertile, Polystichum setiferum, Polystichum setigerum, Polystichum shensiense, Polystichum silvaticum, Polystichum simplicipinnum, Polystichum sinense, Polystichum squarrosum, Polystichum stenophyllum, Polystichum stimulans, Polystichum submite, Polystichum tacticopterum, Polystichum thomsoni, Polystichum tibeticum, Polystichum transvaalense, Polystichum tripteron, Polystichum tsus-simense, Polystichum vestitum, Polystichum wattii, Polystichum whiteleggei, Polystichum xiphophyllum, Polystichum yadongense, and Polystichum yunnanense.

[0053] In some embodiments the nucleic acid molecule encoding the PtIP-83 polypeptide is derived from a fern species in the Order Polypodiales, Family Dryopteridaceae, Genus Rumohra. In some embodiments the nucleic acid molecule encoding the PtIP-83 polypeptide is derived from a fern species in the Order Polypodiales, Family Dryopteridaceae, Genus Rumohra selected from but not limited to Rumohra adiantiformis, Rumohra aristata, Rumohra bartonae, Rumohra berteroana, Rumohra capuronii, Rumohra glandulosa, Rumohra humbertii, Rumohra linearisquamosa, Rumohra lokohensis, Rumohra madagascarica, and Rumohra quadrangularis.

[0054] In some embodiments the nucleic acid molecule encoding the PtIP-83 polypeptide is derived from a fern species in the Order Polypodiales, Family Polypodiaceae Genus Campyloneurum, Genus Drynaria, Genus Lepisorus, Genus Microgramma, Genus Microsorum, Genus Neurodium, Genus Niphidium, Genus Pecluma M.G., Genus Phlebodium, Genus Phymatosorus, Genus Platycerium, Genus Pleopeltis, Genus Polypodium.

[0055] In some embodiments the PtIP-83 polypeptide is derived from a fern species in the Order Polypodiales, Family Polypodiaceae, Genus Microsorum.

[0056] In some embodiments the nucleic acid molecule encoding the PtIP-83 polypeptide is derived from a fern species in the Order Polypodiales, Family Polypodiaceae, Genus Microsorum. selected from but not limited to Microsorum alatum, Microsorum angustifolium, Microsorum aurantiacum, Microsorum australiense, Microsorum baithoense, Microsorum basicordatum, Microsorum biseriatum, Microsorum brassii, Microsorum buergerianum, Microsorum chapaense, Microsorum cinctum, Microsorum commutatum, Microsorum congregatifolium, Microsorum cuneatum, Microsorum cuspidatum, Microsorum dengii, Microsorum egregium, Microsorum emeiensis, Microsorum ensatum, Microsorum ensiforme, Microsorum excelsum, Microsorum fortunei, Microsorum griseorhizoma, Microsorum grossum, Microsorum hemionitideum, Microsorum henryi, Microsorum heterocarpum, Microsorum heterolobum, Microsorum howense, Microsorum insigne, Microsorum intermedium, Microsorum kongtingense, Microsorum krayanense, Microsorum lanceolatum, Microsorum lancifolium, Microsorum lastii, Microsorum latilobatum, Microsorum leandrianum, Microsorum lineare, Microsorum linguiforme, Microsorum longissimum, Microsorum longshengense, Microsorum maculosum, Microsorum maximum, Microsorum membranaceum, Microsorum membranifolium, Microsorum microsorioides, Microsorum minor, Microsorum monstrosum, Microsorum muliense, Microsorum mutense, Microsorum nanchuanense, Microsorum ningpoense, Microsorum normale, Microsorum novae-zealandiae, Microsorum ovalifolium, Microsorum ovatum, Microsorum palmatopedatum, Microsorum pappei, Microsorum papuanum, Microsorum parksii, Microsorum pentaphyllum, Microsorum piliferum, Microsorum pitcairnense, Microsorum powellii, Microsorum pteropodum, Microsorum pteropus, Microsorum punctatum, Microsorum pustulatum, Microsorum rampans, Microsorum revolutum, Microsorum rubidum, Microsorum samarense, Microsorum sapaense, Microsorum sarawakense, Microsorum scandens, Microsorum scolopendria, Microsorum sibomense, Microsorum sinense, Microsorum sopuense, Microsorum spectrum, Microsorum steerei, Microsorum subhemionitideum, Microsorum submarginale, Microsorum subnudum, Microsorum superficiale, Microsorum takhtajanii, Microsorum tenuipes, Microsorum tibeticum, Microsorum triglossum, Microsorum truncatum, Microsorum tsaii, Microsorum varians, Microsorum venosum, Microsorum vieillardii, Microsorum x inaequibasis, Microsorum yiliangensis, and Microsorum zippelii.

[0057] In some embodiments the nucleic acid molecule encoding the PtIP-83 polypeptide is derived from a fern species in the Order Polypodiales, Family Polypodiaceae, Genus Polypodium L. In some embodiments the nucleic acid molecule encoding the PtIP-83 polypeptide is derived from a fern species in the Order Polypodiales, Family Polypodiaceae, Genus Polypodium L. selected from but not limited to Polypodium absidatum, Polypodium acutifolium, Polypodium adiantiforme, Polypodium aequale, Polypodium affine, Polypodium albidopaleatum, Polypodium alcicorne, Polypodium alfarii, Polypodium alfredii, Polypodium alfredii var. curtii, Polypodium allosuroides, Polypodium alsophilicola, Polypodium amamianum, Polypodium amoenum, Polypodium amorphum, Polypodium anetioides, Polypodium anfractuosum, Polypodium anguinum, Polypodium angustifolium f. remotifolia, Polypodium angustifolium var. amphostenon, Polypodium angustifolium var. heterolepis, Polypodium angustifolium var. monstrosa, Polypodium angustipaleatum, Polypodium angustissimum, Polypodium anisomeron var. pectinatum, Polypodium antioquianum, Polypodium aoristisorum, Polypodium apagolepis, Polypodium apicidens, Polypodium apiculatum, Polypodium apoense, Polypodium appalachianum, Polypodium appressum, Polypodium arenarium, Polypodium argentinum, Polypodium argutum, Polypodium armatum, Polypodium aromaticum, Polypodium aspersum, Polypodium assurgens, Polypodium atrum, Polypodium auriculatum, Polypodium balaonense, Polypodium balliviani, Polypodium bamleri, Polypodium bangii, Polypodium bartlettii, Polypodium basale, Polypodium bernoullii, Polypodium biauritum, Polypodium bifrons, Polypodium blepharodes, Polypodium bolivari, Polypodium bolivianum, Polypodium bolobense, Polypodium bombycinum, Polypodium bombycinum var. insularum, Polypodium bradeorum, Polypodium bryophilum, Polypodium bryopodum, Polypodium buchtienii, Polypodium buesii, Polypodium bulbotrichum, Polypodium caceresii, Polypodium californicum f. brauscombii, Polypodium californicum f. parsonsiae, Polypodium californicum, Polypodium calophlebium, Polypodium calvum, Polypodium camptophyllarium var. abbreviatum, Polypodium capitellatum, Polypodium carpinterae, Polypodium chachapoyense, Polypodium chartaceum, Polypodium chimantense, Polypodium chiricanum, Polypodium choquetangense, Polypodium christensenii, Polypodium christii, Polypodium chrysotrichum, Polypodium ciliolepis, Polypodium cinerascens, Polypodium collinsii, Polypodium colysoides, Polypodium confluens, Polypodium conforme, Polypodium confusum, Polypodium congregatifolium, Polypodium connellii, Polypodium consimile var. bourgaeanum, Polypodium consimile var. minor, Polypodium conterminans, Polypodium contiguum, Polypodium cookii, Polypodium coriaceum, Polypodium coronans, Polypodium costaricense, Polypodium costatum, Polypodium crassifolium f. angustissimum, Polypodium crassifolium var. longipes, Polypodium crassulum, Polypodium craterisorum, Polypodium cryptum, Polypodium crystalloneuron, Polypodium cucullatum var. planum, Polypodium cuencanum, Polypodium cumingianum, Polypodium cupreolepis, Polypodium curranii, Polypodium curvans, Polypodium cyathicola, Polypodium cyathisorum, Polypodium cyclocolpon, Polypodium daguense, Polypodium damunense, Polypodium dareiformioides, Polypodium dasypleura, Polypodium decipiens, Polypodium decorum, Polypodium delicatulum, Polypodium deltoideum, Polypodium demeraranum, Polypodium denticulatum, Polypodium diaphanum, Polypodium dilatatum, Polypodium dispersum, Polypodium dissectum, Polypodium dissimulans, Polypodium dolichosorum, Polypodium dolorense, Polypodium donnell-smithii, Polypodium drymoglossoides, Polypodium ebeninum, Polypodium eggersii, Polypodium elmeri, Polypodium elongatum, Polypodium enterosoroides, Polypodium erubescens, Polypodium erythrolepis, Polypodium erythrotrichum, Polypodium eurybasis, Polypodium eurybasis var. villosum, Polypodium exornans, Polypodium falcoideum, Polypodium fallacissimum, Polypodium farinosum, Polypodium faucium, Polypodium feei, Polypodium ferrugineum, Polypodium feuillei, Polypodium firmulum, Polypodium firmum, Polypodium flaccidum, Polypodium flagellare, Polypodium flexuosum, Polypodium flexuosum var. ekmanii, Polypodium forbesii, Polypodium formosanum, Polypodium fraxinifolium subsp. articulatum, Polypodium fraxinifolium subsp. luridum, Polypodium fructuosum, Polypodium fucoides, Polypodium fulvescens, Polypodium galeottii, Polypodium glaucum, Polypodium glycyrrhiza, Polypodium gracillimum, Polypodium gramineum, Polypodium grandifolium, Polypodium gratum, Polypodium graveolens, Polypodium griseo-nigrum, Polypodium griseum, Polypodium guttatum, Polypodium haalilioanum, Polypodium hammatisorum, Polypodium hancockii, Polypodium haplophlebicum, Polypodium harrisii, Polypodium hastatum var. simplex, Polypodium hawaiiense, Polypodium heanophyllum, Polypodium helleri, Polypodium hemionitidium, Polypodium henryi, Polypodium herzogii, Polypodium hesperium, Polypodium hessii, Polypodium hombersleyi, Polypodium hostmannii, Polypodium humile, Polypodium hyalinum, Polypodium iboense, Polypodium induens var. subdentatum, Polypodium insidiosum, Polypodium insigne, Polypodium intermedium subsp. masafueranum var. obtuseserratum, Polypodium intramarginale, Polypodium involutum, Polypodium itatiayense, Polypodium javanicum, Polypodium juglandifolium, Polypodium kaniense, Polypodium knowltoniorum, Polypodium kyimbilense, Polypodium I'herminieri var. costaricense, Polypodium lachniferum f. incurvata, Polypodium lachniferum var. glabrescens, Polypodium lachnopus, Polypodium lanceolatum var. complanatum, Polypodium lanceolatum var. trichophorum, Polypodium latevagans, Polypodium laxifrons, Polypodium laxifrons var. lividum, Polypodium lehmannianum, Polypodium leiorhizum, Polypodium leptopodon, Polypodium leuconeuron var. angustifolia, Polypodium leuconeuron var. latifolium, Polypodium leucosticta, Polypodium limulum, Polypodium lindigii, Polypodium lineatum, Polypodium lomarioides, Polypodium longifrons, Polypodium loretense, Polypodium loriceum var. umbraticum, Polypodium loriforme, Polypodium loxogramme f. gigas, Polypodium ludens, Polypodium luzonicum, Polypodium lycopodioides f. obtusum, Polypodium lycopodioides L., Polypodium macrolepis, Polypodium macrophyllum, Polypodium macrosorum, Polypodium macrosphaerum, Polypodium maculosum, Polypodium madrense, Polypodium manmeiense, Polypodium margaritiferum, Polypodium maritimum, Polypodium martensii, Polypodium mayoris, Polypodium megalolepis, Polypodium melanotrichum, Polypodium menisciifolium var. pubescens, Polypodium meniscioides, Polypodium merrillii, Polypodium mettenii, Polypodium mexiae, Polypodium microsorum, Polypodium militare, Polypodium minimum, Polypodium minusculum, Polypodium mixtum, Polypodium mollendense, Polypodium mollissimum, Polypodium moniliforme var. minus, Polypodium monoides, Polypodium monticola, Polypodium montigenum, Polypodium moritzianum, Polypodium moultonii, Polypodium multicaudatum, Polypodium multilineatum, Polypodium multisorum, Polypodium munchii, Polypodium muscoides, Polypodium myriolepis, Polypodium myriophyllum, Polypodium myriotrichum, Polypodium nematorhizon, Polypodium nemorale, Polypodium nesioticum, Polypodium nigrescentium, Polypodium nigripes, Polypodium nigrocinctum, Polypodium nimbatum, Polypodium nitidissimum, Polypodium nitidissimum var. latior, Polypodium nubrigenum, Polypodium oligolepis, Polypodium oligosorum, Polypodium oligosorum, Polypodium olivaceum, Polypodium olivaceum var. elatum, Polypodium oodes, Polypodium oosphaerum, Polypodium oreophilum, Polypodium ornatissimum, Polypodium ornatum, Polypodium ovatum, Polypodium oxylobum, Polypodium oxypholis, Polypodium pakkaense, Polypodium pallidum, Polypodium palmatopedatum, Polypodium palmeri, Polypodium panamense, Polypodium parvum, Polypodium patagonicum, Polypodium paucisorum, Polypodium pavonianum, Polypodium pectinatum var. caliense, Polypodium pectinatum var. hispidum, Polypodium pellucidum, Polypodium pendulum var. boliviense, Polypodium percrassum, Polypodium perpusillum, Polypodium peruvianum var. subgibbosum, Polypodium phyllitidis var. elongatum, Polypodium pichinchense, Polypodium pilosissimum, Polypodium pilosissimum var. glabriusculum, Polypodium pilossimum var. tunguraquensis, Polypodium pityrolepis, Polypodium platyphyllum, Polypodium playfairii, Polypodium plebeium var. cooperi, Polypodium plectolepidioides, Polypodium pleolepis, Polypodium plesiosorum var.i, Polypodium podobasis, Polypodium podocarpum, Polypodium poloense, Polypodium polydatylon, Polypodium polypodioides var. aciculare, Polypodium polypodioides var. michauxianum, Polypodium praetermissum, Polypodium preslianum var. immersum, Polypodium procerum, Polypodium procerum, Polypodium productum, Polypodium productum, Polypodium prolongilobum, Polypodium propinguum, Polypodium proteus, Polypodium pruinatum, Polypodium pseudocapillare, Polypodium pseudofraternum, Polypodium pseudonutans, Polypodium pseudoserratum, Polypodium pulcherrimum, Polypodium pulogense, Polypodium pungens, Polypodium purpusii, Polypodium radicale, Polypodium randallii, Polypodium ratiborii, Polypodium reclinatum, Polypodium recreense, Polypodium repens var. abruptum, Polypodium revolvens, Polypodium rhachipterygium, Polypodium rhomboideum, Polypodium rigens, Polypodium robustum, Polypodium roraimense, Polypodium roraimense, Polypodium rosei, Polypodium rosenstockii, Polypodium rubidum, Polypodium rudimentum, Polypodium rusbyi, Polypodium sablanianum, Polypodium sarmentosum, Polypodium saxicola, Polypodium schenckii, Polypodium schlechteri, Polypodium scolopendria, Polypodium scolopendria, Polypodium scolopendrium, Polypodium scouleri, Polypodium scutulatum, Polypodium segregatum, Polypodium semihirsutum, Polypodium semihirsutum var. fuscosetosum, Polypodium senile var. minor, Polypodium sericeolanatum, Polypodium serraeforme, Polypodium serricula, Polypodium sesquipedala, Polypodium sessilifolium, Polypodium setosum var. calvum, Polypodium setulosum, Polypodium shaferi, Polypodium sibomense, Polypodium siccum, Polypodium simacense, Polypodium simulans, Polypodium singeri, Polypodium sinicum, Polypodium sintenisii, Polypodium skutchii, Polypodium sloanei, Polypodium sodiroi, Polypodium sordidulum, Polypodium sordidum, Polypodium sphaeropteroides, Polypodium sphenodes, Polypodium sprucei, Polypodium sprucei var. furcativenosa, Polypodium steirolepis, Polypodium stenobasis, Polypodium stenolepis, Polypodium stenopterum, Polypodium subcapillare, Polypodium subflabelliforme, Polypodium subhemionitidium, Polypodium subinaequale, Polypodium subintegrum, Polypodium subspathulatum, Polypodium subtile, Polypodium subvestitum, Polypodium subviride, Polypodium superficiale var. attenuatum, Polypodium superficiale var. chinensis, Polypodium sursumcurrens, Polypodium tablazianum, Polypodium taenifolium, Polypodium tamandarei, Polypodium tatei, Polypodium tenuiculum var. acrosora, Polypodium tenuiculum var. brasiliense, Polypodium tenuilore, Polypodium tenuinerve, Polypodium tepuiense, Polypodium teresae, Polypodium tetragonum var. incompletum, Polypodium thysanolepis var. bipinnatifidum, Polypodium thyssanolepis, var. thyssanolepis, Polypodium thyssanolepsi, Polypodium tobagense, Polypodium trichophyllum, Polypodium tridactylum, Polypodium tridentatum, Polypodium trifurcatum var. brevipes, Polypodium triglossum, Polypodium truncatulum, Polypodium truncicola var. major, Polypodium truncicola var. minor, Polypodium tuberosum, Polypodium tunguraguae, Polypodium turquinum, Polypodium turrialbae, Polypodium ursipes, Polypodium vagans, Polypodium valdealatum, Polypodium versteegii, Polypodium villagranii, Polypodium virginianum f. cambroideum, Polypodium virginianum f. peraferens, Polypodium vittarioides, Polypodium vulgare, Polypodium vulgare L., Polypodium vulgare subsp. oreophilum, Polypodium vulgare var. acuminatum, Polypodium vulpinum, Polypodium williamsii, Polypodium wobbense, Polypodium x fallacissimum-guttatum, Polypodium xantholepis, Polypodium xiphopteris, Polypodium yarumalense, Polypodium yungense, and Polypodium zosteriforme.

[0058] In some embodiments the nucleic acid molecule encoding the PtIP-83 polypeptide is derived from a fern species in the Order Polypodiales, Family Polypodiaceae, Genus Platycerium.

[0059] In some embodiments the nucleic acid molecule encoding the PtIP-83 polypeptide is derived from a species in the Division Lycophyta. The phylogeny of extant Lycopods as used herein is based on the classification by N. Wikstrom, American Fern Journal, 91:150-156 (2001). Other phylogenic classifications of extant Lycopods are known to one skilled in the art. Additional information on the phylogeny of ferns can be found at mobot.org/MOBOT/research/APweb/ (which can be accessed using the “www” prefix) and Schuettpelz E. and Pryer K. M., TAXON 56: 1037-1050 (2007) based on three plastid genes. Additional Lycopod species can be found at homepages.caverock.net.nz/-bj/fern/list.htm (which can be accessed using the http:// prefix).

[0060] In some embodiments the nucleic acid molecule encoding the PtIP-83 polypeptide is derived from a species in the Class Isoetopsida or Class Lycopodiopsida.

[0061] In some embodiments the nucleic acid molecule encoding the PtIP-83 polypeptide is derived from a species in the Class Isoetopsida, Order Selaginales. In some embodiments the nucleic acid molecule encoding the PtIP-83 polypeptide is derived from a fern species in the Class Isoetopsida, Order Selaginales, Family Selaginellaceae. In some embodiments the nucleic acid molecule encoding the PtIP-83 polypeptide is derived from a species in the Genus Selaginella.

[0062] In some embodiments the nucleic acid molecule encoding the PtIP-83 polypeptide is derived from a species in the Class Lycopodiopsida, Order Lycopodiales. In some embodiments the nucleic acid molecule encoding the PtIP-83 polypeptide is derived from a fern species in the Class Lycopodiopsida, Order Lycopodiales Family Lycopodiaceae or Family Huperziaceae. In some embodiments the nucleic acid molecule encoding the PtIP-83 polypeptide is derived from a species in the Genus Austrolycopodium, Dendrolycopodium, Diphasiastrum, Diphasium, Huperzia, Lateristachys, Lycopodiastrum, Lycopodiella, Lycopodium, Palhinhaea, Pseudodiphasium, Pseudolycopodiella, Pseudolycopodium or Spinulum. In some embodiments the nucleic acid molecule encoding the PtIP-83 polypeptide is derived from a species in the Genus Lycopodium.

[0063] In some embodiments the nucleic acid molecule encodes a PtIP-83 polypeptide comprises an amino acid sequence MOTIF selected from: an amino acid sequence MOTIF 1 as represented by an amino acid sequence of the formula MP[DE]MPSEADWSIFVNE[IV]EAVAEGMPTEVSEVP[AV]WKAKCKN[MV]AALGREM[SC]I (SEQ ID NO: 646); an amino acid sequence MOTIF 2 as represented by an amino acid sequence of the formula PQLQYRMYG[NS]LI[KN]QMAQVAQNYDQ[ED]FKQ[FL]KLFI[IA]QNQI[LF]GSYLLQQN[KR]A F (SEQ ID NO: 647); an amino acid sequence MOTIF 3 as represented by an amino acid sequence of the formula NTFMQMTPFTRWRLRLSASASENA[EG]LAFPTATA[PL]DSTT[EQ][IV]VITFHVTAIR (SEQ ID NO: 648); an amino acid sequence MOTIF 4 as represented by an amino acid sequence of the formula [DN]FTSRHVVK[GD]IPVSLLLDGEDWEFEIPVQ[AG]GMSSFP (SEQ ID NO: 649); an amino acid sequence MOTIF 5 as represented by an amino acid sequence of the formula IIHQP[SA]T[RQ][ST]G[IT]VYILLQGSTIFHDRRR[DE]EVMTFQAA[DA]PLN[FY][QH]YAYRLDT G (SEQ ID NO: 650); an amino acid sequence MOTIF 6 as represented by an amino acid sequence of the formula S[HQ]ADRLAAIQP[AV]DLTN[HY]LEMAT[HQ]MDMRTT[RS][MI]L[IL]GLLN[MI]LRIQNAALMY EY (SEQ ID NO: 651); an amino acid sequence MOTIF 7 as represented by an amino acid sequence of the formula [VL]DRVEFSEVMVIHRMYVRL[SA]DL[ND]VGEL[PE]GA[EG][RK]VKR[VL]YV[FL]ADVVE (SEQ ID NO: 652); an amino acid sequence MOTIF 8 as represented by an amino acid sequence of the formula A[DE]RELQMESFHSAVISQRRQEL[ND]TA[IF]AKM[DE]R[LM]SLQMEEE[NS]RAMEQAQKE M (SEQ ID NO: 653); an amino acid sequence MOTIF 9 as represented by an amino acid sequence of the formula FVTAGATAPGA[AV]ASAGQAVSIAGQAAQ[AG]LRRVVEILE[GQ]LEAVMEVVAA[VI]K (SEQ ID NO: 654); an amino acid sequence MOTIF 10 as represented by an amino acid sequence of the formula DGMNWG[IT]YI[YH]GE[KE]V[EQ]RSPLLPSNAILAVWADRC[TI]ITSARHNH[VF]NAPGR[IV]I (SEQ ID NO: 655); an amino acid sequence MOTIF 11 as represented by an amino acid sequence of the formula [KV][VK][CA]RPPSPDM[MV]SAVAEHALWLNDVLLQVVQ[KN]ESQ[LM]QGT[AE]PYNECLAL LGR (SEQ ID NO: 656); an amino acid sequence MOTIF 12 as represented by an amino acid sequence of the formula PTELT[VA]WPLGMDTV[AG]NLLIAQENAAL[VL]GLIQLGPSS (SEQ ID NO: 657); an amino acid sequence MOTIF 13 as represented by an amino acid sequence of the formula RDQ[MT][HQ]MPGSVTVI[IV]LCRLLQFP[IT]DGSQA[TA]T (SEQ ID NO: 658); an amino acid sequence MOTIF 14 as represented by an amino acid sequence of the formula TSIPVEVVTDP[SN]ILLGMQTTV[LH]IAEL (SEQ ID NO: 659); an amino acid sequence MOTIF 15 as represented by an amino acid sequence of the formula EGLR[EQ]FQNRQVARA[VL]FAVLKAVA[MQ]I[AG] (SEQ ID NO: 660); an amino acid sequence MOTIF 16 as represented by an amino acid sequence of the formula W[TS]RVRIRHLEM[QH]F[AV]QEASG (SEQ ID NO: 661); an amino acid sequence MOTIF 17 as represented by an amino acid sequence of the formula QISELQY[ED]IWVQG[LM][ML]RDIA (SEQ ID NO: 662); an amino acid sequence MOTIF 18 as represented by an amino acid sequence of the formula TFTLGSGVTGITSMHGEPSLDPWNGVSLDSASPTAF (SEQ ID NO: 663); an amino acid sequence MOTIF 19 as represented by an amino acid sequence of the formula MDYSTLYRDLNQIS (SEQ ID NO: 664); an amino acid sequence MOTIF 20 as represented by an amino acid sequence of the formula LRLPFM[QK]LHARVIEQN[VR]K[SE] (SEQ ID NO: 665); an amino acid sequence MOTIF 21 as represented by an amino acid sequence of the formula VDSLEQVG[QH][IL]V[GD]AP (SEQ ID NO: 666); an amino acid sequence MOTIF 22 as represented by an amino acid sequence of the formula [IV][EQ][CA]VMK[IM]GRF[VG][SL]VV (SEQ ID NO: 667); an amino acid sequence MOTIF 23 as represented by an amino acid sequence of the formula TLTNEPSE[EQ]F (SEQ ID NO: 668); and an amino acid sequence MOTIF 24 as represented by an amino acid sequence of the formula LPRQSRNISF (SEQ ID NO: 669).

[0064] In some embodiments the nucleic acid molecule encodes a PtIP-83 polypeptide comprises an amino acid sequence MOTIF selected from: an amino acid sequence MOTIF 1 having at least 90% sequence identity to the amino acid sequence as represented by the formula MP[DE]MPSEADWSIFVNE[IV]EAVAEGMPTEVSEVP[AV]WKAKCKN[MV]AALGREM[SC]I (SEQ ID NO: 646); an amino acid sequence MOTIF 2 having at least 90% sequence identity to the amino acid sequence as represented by the formula PQLQYRMYG[NS]LI[KN]QMAQVAQNYDQ[ED]FKQ[FL]KLFI[IA]QNQI[LF]GSYLLQQN[KR]A F (SEQ ID NO: 647); an amino acid sequence MOTIF 3 having at least 90% sequence identity to the amino acid sequence as represented by the formula NTFMQMTPFTRWRLRLSASASENA[EG]LAFPTATA[PL]DSTT[EQ][IV]VITFHVTAIR (SEQ ID NO: 648); an amino acid sequence MOTIF 4 having at least 90% sequence identity to the amino acid sequence as represented by the formula [DN]FTSRHVVK[GD]IPVSLLLDGEDWEFEIPVQ[AG]GMSSFP (SEQ ID NO: 649); an amino acid sequence MOTIF 5 having at least 90% sequence identity to the amino acid sequence as represented by the formula IIHQP[SA]T[RQ][ST]G[IT]VYILLQGSTIFHDRRR[DE]EVMTFQAA[DA]PLN[FY][QH]YAYRLDT G (SEQ ID NO: 650); an amino acid sequence MOTIF 6 having at least 90% sequence identity to the amino acid sequence as represented by the formula S[HQ]ADRLAAIQP[AV]DLTN[HY]LEMAT[HQ]MDMRTT[RS][MI]L[IL]GLLN[MI]LRIQNAALMY EY (SEQ ID NO: 651); an amino acid sequence MOTIF 7 having at least 90% sequence identity to the amino acid sequence as represented by the formula [VL]DRVEFSEVMVIHRMYVRL[SA]DL[ND]VGEL[PE]GA[EG][RK]VKR[VL]YV[FL]ADVVE (SEQ ID NO: 652); an amino acid sequence MOTIF 8 having at least 90% sequence identity to the amino acid sequence as represented by the formula A[DE]RELQMESFHSAVISQRRQEL[ND]TA[IF]AKM[DE]R[LM]SLQMEEE[NS]RAMEQAQKE M (SEQ ID NO: 653); an amino acid sequence MOTIF 9 having at least 90% sequence identity to the amino acid sequence as represented by the formula FVTAGATAPGA[AV]ASAGQAVSIAGQAAQ[AG]LRRVVEILE[GQ]LEAVMEVVAA[VI]K (SEQ ID NO: 654); an amino acid sequence MOTIF 10 having at least 90% sequence identity to the amino acid sequence as represented by the formula DGMNWG[IT]YI[YH]GE[KE]V[EQ]RSPLLPSNAILAVWADRC[TI]ITSARHNH[VF]NAPGR[IV]I (SEQ ID NO: 655); an amino acid sequence MOTIF 11 having at least 90% sequence identity to the amino acid sequence as represented by the formula [KV][VK][CA]RPPSPDM[MV]SAVAEHALWLNDVLLQVVQ[KN]ESQ[LM]QGT[AE]PYNECLAL LGR (SEQ ID NO: 656); an amino acid sequence MOTIF 12 having at least 90% sequence identity to the amino acid sequence as represented by the formula PTELT[VA]WPLGMDTV[AG]NLLIAQENAAL[VL]GLIQLGPSS (SEQ ID NO: 657); an amino acid sequence MOTIF 13 having at least 90% sequence identity to the amino acid sequence as represented by the formula RDQ[MT][HQ]MPGSVTVI[IV]LCRLLQFP[IT]DGSQA[TA]T (SEQ ID NO: 658); an amino acid sequence MOTIF 14 having at least 90% sequence identity to the amino acid sequence as represented by the formula TSIPVEVVTDP[SN]ILLGMQTTV[LH]IAEL (SEQ ID NO: 659); an amino acid sequence MOTIF 15 having at least 90% sequence identity to the amino acid sequence as represented by the formula EGLR[EQ]FQNRQVARA[VL]FAVLKAVA[MQ]I[AG] (SEQ ID NO: 660); an amino acid sequence MOTIF 16 having at least 90% sequence identity to the amino acid sequence as represented by the formula W[TS]RVRIRHLEM[QH]F[AV]QEASG (SEQ ID NO: 661); an amino acid sequence MOTIF 17 having at least 90% sequence identity to the amino acid sequence as represented by the formula QISELQY[ED]IWVQG[LM][ML]RDIA (SEQ ID NO: 662); an amino acid sequence MOTIF 18 having at least 90% sequence identity to the amino acid sequence as represented by the formula TFTLGSGVTGITSMHGEPSLDPWNGVSLDSASPTAF (SEQ ID NO: 663); an amino acid sequence MOTIF 19 having at least 90% sequence identity to the amino acid sequence as represented by the formula MDYSTLYRDLNQIS (SEQ ID NO: 664); an amino acid sequence MOTIF 20 having at least 90% sequence identity to the amino acid sequence as represented by the formula LRLPFM[QK]LHARVIEQN[VR]K[SE] (SEQ ID NO: 665); an amino acid sequence MOTIF 21 having at least 90% sequence identity to the amino acid sequence as represented by the formula VDSLEQVG[QH][IL]V[GD]AP (SEQ ID NO: 666); an amino acid sequence MOTIF 22 having at least 90% sequence identity to the amino acid sequence as represented by the formula [IV][EQ][CA]VMK[IM]GRF[VG][SL]VV (SEQ ID NO: 667); an amino acid sequence MOTIF 23 having at least 90% sequence identity to the amino acid sequence as represented by the formula TLTNEPSE[EQ]F (SEQ ID NO: 668); and an amino acid sequence MOTIF 24 having at least 90% sequence identity to the amino acid sequence as represented by the formula LPRQSRNISF (SEQ ID NO: 669).

[0065] In some embodiments the nucleic acid molecule encodes a PtIP-83 polypeptide comprises an amino acid sequence MOTIF selected from: an amino acid sequence MOTIF 1 as represented by an amino acid sequence of the formula MP[DE]MP[ST][ED]ADWSIFVNE[IVL]EAVAEGMPTEVSEVP[AV]W[KR]AKCKN[MV]AALGRE M[SC]I (SEQ ID NO: 670); an amino acid sequence MOTIF 2 as represented by an amino acid sequence of the formula PQLQYRMYG[NS]LI[KRN]QMAQVAQNYD[QR][ED]FK[QR][FL][KR]LFI[IAVL]QNQI[LF]GSYL L[QE]QN[KR]AF (SEQ ID NO: 671); an amino acid sequence MOTIF 3 as represented by an amino acid sequence of the formula N[TK]FMQMTPFT[RH]WRLRLSASA[SPKA]EN[AK][EG]LAFPTATA[PL]DSTT[EQ][IV][VA]ITF HVTAIR (SEQ ID NO: 672); an amino acid sequence MOTIF 4 as represented by an amino acid sequence of the formula [DN]FTSRHVVK[GD]IPV[SN]LLLDG[EG]DWEFEIPVQ[AG]GMSSFP (SEQ ID NO: 673); an amino acid sequence MOTIF 5 as represented by an amino acid sequence of the formula IIHQP[SA]T[RQ][ST]G[IT][VI]YILLQGST[IV]FHDRRR[DE][EQ]V[ML]T[FP]QAA[DAV]PLN[FY][QH]YAYRLDTG (SEQ ID NO: 674); an amino acid sequence MOTIF 6 as represented by an amino acid sequence of the formula S[HQ]ADRLAAIQP[AV][DN]LTN[HYF]LEMAT[HQ]MDMRTT[RS][MI]L[IL]GLLN[MI][LM]RIQN AAL[MR]YEY (SEQ ID NO: 675); an amino acid sequence MOTIF 7 as represented by an amino acid sequence of the formula [VL]D[RQ]VEFSEVMVIHRMYV[N]RL[SA]DL[ND]V[GA][EQ]L[PE]GA[EG][RK]VKR[VL]YV[FL]ADVVE (SEQ ID NO: 676); an amino acid sequence MOTIF 8 as represented by an amino acid sequence of the formula A[DE]RELQMESFH[SA]AVISQ[RK]R[QGE]EL[ND][TD][AT][IF]AKM[DE]R[LM]SLQMEEE[NS D][RG]AMEQA[QR]KEM (SEQ ID NO: 677); an amino acid sequence MOTIF 9 as represented by an amino acid sequence of the formula F[VL]TAGATAPGA[AV]ASAGQAV[SN]IAGQAAQ[AG]LRRVVEILE[GQ]LEAVMEVVAA[VI]K (SEQ ID NO: 678); an amino acid sequence MOTIF 10 as represented by an amino acid sequence of the formula D[GD][MA][NK]WG[IT]Y[IV][YH][GA]E[KE]V[EQ][RVL]SPL[LYF][PN][SNG][NW][ASP][IY]L[AG V]V[WE]A[DQ]R[CS][TI]IT[SA]A[RFM]HN[HVT][VF][ND][AER]PG[RW][IV][IR] (SEQ ID NO: 679); an amino acid sequence MOTIF 11 as represented by an amino acid sequence of the formula [KV][VK][CA][RGC][PHY]PSP[DE][MIL][MV]SAV[AG][EV]HA[LIN]WL[NS][DK]VLL[QR]VVQ[K N]ES[QH][LM]QGT[AE][PSA]YNECLALLGR (SEQ ID NO: 680); an amino acid sequence MOTIF 12 as represented by an amino acid sequence of the formula [PN]T[EQ]LT[VAT]WPL[GR]MDTV[AG][ND]LLI[AT][QH]E[NS]AAL[VLS]GL[ITMA]QLG[PQ][S P]S (SEQ ID NO: 681); an amino acid sequence MOTIF 13 as represented by an amino acid sequence of the formula [RLC][DLWK][QNPR][MTP][HQR][MIL]PGSVTVI[IV]LCRLLQFP[IT][DG]G[SR][QFR][AS][TAD][TW] (SEQ ID NO: 682); an amino acid sequence MOTIF 14 as represented by an amino acid sequence of the formula [TA][SGV][IL]PV[ED]VVTDP[SN]IL[LM]GMQT[TS]V[LH]IAEL (SEQ ID NO: 683); an amino acid sequence MOTIF 15 as represented by an amino acid sequence of the formula EGLR[EQ]FQN[RE]QVA[RN]A[VL]FAVL[KS][AS]VA[MQ]I[AG] (SEQ ID NO: 684); an amino acid sequence MOTIF 16 as represented by an amino acid sequence of the formula W[TS]RVRIRHLEM[QH]F[AV][QK]E[AS][SM][GN] (SEQ ID NO: 685); an amino acid sequence MOTIF 17 as represented by an amino acid sequence of the formula Q[IM]S[EQ]LQY[ED]IWVQG[LM][ML]RD[IM]A (SEQ ID NO: 686); an amino acid sequence MOTIF 18 as represented by an amino acid sequence of the formula TFTLGSGVTGITSMHGEPSLDPWNGVSLDSASPTAF (SEQ ID NO: 663); an amino acid sequence MOTIF 19 as represented by an amino acid sequence of the formula [MLV]DY[SK][TSK]L[YF][RE]DLNQIS (SEQ ID NO: 687); an amino acid sequence MOTIF 20 as represented by an amino acid sequence of the formula L[RHQ]L[PT]FM[QK]LHA[RIT][VQL][IR]E[QER][NF][VR][KWS][SE] (SEQ ID NO: 688); an amino acid sequence MOTIF 21 as represented by an amino acid sequence of the formula V[DN][SA]L[ED]QV[GS][QH][IL]V[GD]AP (SEQ ID NO: 689); an amino acid sequence MOTIF 22 as represented by an amino acid sequence of the formula [IV][EQH][CAS][VA][MI]K[IM][GV][RP][FI][VG][SL]VV (SEQ ID NO: 690); an amino acid sequence MOTIF 23 as represented by an amino acid sequence of the formula TLTN[EQ]PSE[EQDH]F (SEQ ID NO: 691); and an amino acid sequence MOTIF 24 as represented by an amino acid sequence of the formula LP[RS]QS[RT]N[IV]SF (SEQ ID NO: 692).

[0066] In some embodiments the nucleic acid molecule encodes a PtIP-83 polypeptide comprises an amino acid sequence MOTIF selected from: an amino acid sequence MOTIF 1 having at least 90% sequence identity to the amino acid sequence as represented by the formula MP[DE]MP[ST][ED]ADWSIFVNE[IVL]EAVAEGMPTEVSEVP[AV]W[KR]AKCKN[MV]AALGRE M[SC]I (SEQ ID NO: 670); an amino acid sequence MOTIF 2 having at least 90% sequence identity to the amino acid sequence as represented by the formula PQLQYRMYG[NS]LI[KRN]QMAQVAQNYD[QR][ED]FK[QR][FL][KR]LFI[IAVL]QNQI[LF]GSYL L[QE]QN[KR]AF (SEQ ID NO: 671); an amino acid sequence MOTIF 3 having at least 90% sequence identity to the amino acid sequence as represented by the formula N[TK]FMQMTPFT[RH]WRLRLSASA[SPKA]EN[AK][EG]LAFPTATA[PL]DSTT[EQ][IV][VA]ITF HVTAIR (SEQ ID NO: 672); an amino acid sequence MOTIF 4 having at least 90% sequence identity to the amino acid sequence as represented by the formula [DN]FTSRHVVK[GD]IPV[SN]LLLDG[EG]DWEFEIPVQ[AG]GMSSFP (SEQ ID NO: 673); an amino acid sequence MOTIF 5 having at least 90% sequence identity to the amino acid sequence as represented by the formula IIHQP[SA]T[RQ][ST]G[IT][VI]YILLQGST[IV]FHDRRR[DE][EQ]V[ML]T[FP]QAA[DAV]PLN[FY][QH]YAYRLDTG (SEQ ID NO: 674); an amino acid sequence MOTIF 6 having at least 90% sequence identity to the amino acid sequence as represented by the formula S[HQ]ADRLAAIQP[AV][DN]LTN[HYF]LEMAT[HQ]MDMRTT[RS][MI]L[IL]GLLN[MI][LM]RIQN AAL[MR]YEY (SEQ ID NO: 675); an amino acid sequence MOTIF 7 having at least 90% sequence identity to the amino acid sequence as represented by the formula [VL]D[RQ]VEFSEVMVIHRMYV[N]RL[SA]DL[ND]V[GA][EQ]L[PE]GA[EG][RK]VKR[VL]YV[FL]ADVVE (SEQ ID NO: 676); an amino acid sequence MOTIF 8 having at least 90% sequence identity to the amino acid sequence as represented by the formula A[DE]RELQMESFH[SA]AVISQ[RK]R[QGE]EL[ND][TD][AT][IF]AKM[DE]R[LM]SLQMEEE[NS D][RG]AMEQA[QR]KEM (SEQ ID NO: 677); an amino acid sequence MOTIF 9 having at least 90% sequence identity to the amino acid sequence as represented by the formula F[VL]TAGATAPGA[AV]ASAGQAV[SN]IAGQAAQ[AG]LRRVVEILE[GQ]LEAVMEVVAA[VI]K (SEQ ID NO: 678); an amino acid sequence MOTIF 10 having at least 90% sequence identity to the amino acid sequence as represented by the formula D[GD][MA][NK]WG[IT]Y[IV][YH][GA]E[KE]V[EQ][RVL]SPL[LYF][PN][SNG][NW][ASP][IY]L[AG V]V[WE]A[DQ]R[CS][TI]IT[SA]A[RFM]HN[HVT][VF][ND][AER]PG[RW][IV][IR] (SEQ ID NO: 679); an amino acid sequence MOTIF 11 having at least 90% sequence identity to the amino acid sequence as represented by the formula [KV][VK][CA][RGC][PHY]PSP[DE][MIL][MV]SAV[AG][EV]HA[LIN]WL[NS][DK]VLL[QR]VVQ[K N]ES[QH][LM]QGT[AE][PSA]YNECLALLGR (SEQ ID NO: 680); an amino acid sequence MOTIF 12 having at least 90% sequence identity to the amino acid sequence as represented by the formula [PN]T[EQ]LT[VAT]WPL[GR]MDTV[AG][ND]LLI[AT][QH]E[NS]AAL[VLS]GL[ITMA]QLG[PQ][S P]S (SEQ ID NO: 681); an amino acid sequence MOTIF 13 having at least 90% sequence identity to the amino acid sequence as represented by the formula [RLC][DLWK][QNPR][MTP][HQR][MIL]PGSVTVI[IV]LCRLLQFP[IT][DG]G[SR][QFR][AS][TAD][TW] (SEQ ID NO: 682); an amino acid sequence MOTIF 14 having at least 90% sequence identity to the amino acid sequence as represented by the formula [TA][SGV][IL]PV[ED]VVTDP[SN]IL[LM]GMQT[TS]V[LH]IAEL (SEQ ID NO: 683); an amino acid sequence MOTIF 15 having at least 90% sequence identity to the amino acid sequence as represented by the formula EGLR[EQ]FQN[RE]QVA[RN]A[VL]FAVL[KS][AS]VA[MQ]I[AG](SEQ ID NO: 684); an amino acid sequence MOTIF 16 having at least 90% sequence identity to the amino acid sequence as represented by the formula W[TS]RVRIRHLEM[QH]F[AV][QK]E[AS][SM][GN] (SEQ ID NO: 685); an amino acid sequence MOTIF 17 having at least 90% sequence identity to the amino acid sequence as represented by the formula Q[IM]S[EQ]LQY[ED]IWVQG[LM][ML]RD[IM]A (SEQ ID NO: 686); an amino acid sequence MOTIF 18 having at least 90% sequence identity to the amino acid sequence as represented by the formula TFTLGSGVTGITSMHGEPSLDPWNGVSLDSASPTAF (SEQ ID NO: 663); an amino acid sequence MOTIF 19 having at least 90% sequence identity to the amino acid sequence as represented by the formula [MLV]DY[SK][TSK]L[YF][RE]DLNQIS (SEQ ID NO: 687); an amino acid sequence MOTIF 20 having at least 90% sequence identity to the amino acid sequence as represented by the formula L[RHQ]L[PT]FM[QK]LHA[RIT][VQL][IR]E[QER][NF][VR][KWS][SE] (SEQ ID NO: 688); an amino acid sequence MOTIF 21 having at least 90% sequence identity to the amino acid sequence as represented by the formula V[DN][SA]L[ED]QV[GS][QH][IL]V[GD]AP (SEQ ID NO: 689); an amino acid sequence MOTIF 22 having at least 90% sequence identity to the amino acid sequence as represented by the formula [IV][EQH][CAS][VA][MI]K[IM][GV][RP][FI][VG][SL]VV (SEQ ID NO: 690); an amino acid sequence MOTIF 23 having at least 90% sequence identity to the amino acid sequence as represented by the formula TLTN[EQ]PSE[EQDH]F (SEQ ID NO: 691); and an amino acid sequence MOTIF 24 having at least 90% sequence identity to the amino acid sequence as represented by the formula LP[RS]QS[RT]N[IV]SF (SEQ ID NO: 692).

[0067] In some embodiments the nucleic acid molecule encodes a PtIP-83 polypeptide comprises an amino acid sequence MOTIF selected from: an amino acid sequence MOTIF 1 as represented by an amino acid sequence of the formula MP[DE]MP[ST][ED]ADWSIFVNE[IVL]EAVAEGMPTEVSEVP[AVIL]W[KR]AKCKN[MVIL]AAL GREM[SCT]I (SEQ ID NO: 693); an amino acid sequence MOTIF 2 as represented by an amino acid sequence of the formula PQLQYRMYG[NS]LI[KRNQ]QMAQVAQNYD[QRNK][ED]FK[QRNK][FL][KR]LFI[IAVL]QNQI[L FIV]GSYLL[QEND]QN[KR]AF (SEQ ID NO: 694); an amino acid sequence MOTIF 3 as represented by an amino acid sequence of the formula N[TKSR]FMQMTPFT[RHK]WRLRLSASA[SPKATR]EN[AKR][EG]LAFPTATA[PLIV]DSTT[EQ ND][IVL][VAIL]ITFHVTAIR (SEQ ID NO: 695); an amino acid sequence MOTIF 4 as represented by an amino acid sequence of the formula [DNQE]FTSRHVVK[GDE]IPV[SNTQ]LLLDG[EGD]DWEFEIPVQ[AG]GMSSFP (SEQ ID NO: 696); an amino acid sequence MOTIF 5 as represented by an amino acid sequence of the formula IIHQP[SAT]T[RQKN][ST]G[ITLVS][VIL]YILLQGST[IVL]FHDRRR[DE][EQDN]V[MLIV]T[FP]QA A[DAVEIL]PLN[FY][QHN]YAYRLDTG (SEQ ID NO: 697); an amino acid sequence MOTIF 6 as represented by an amino acid sequence of the formula S[HQN]ADRLAAIQP[AVIL][DN]LTN[HYF]LEMAT[HQN]MDMRTT[RSKT][MILV]L[ILV]GLLN[M ILV][LMIV]RIQNAAL[MRILVK]YEY (SEQ ID NO: 698); an amino acid sequence MOTIF 7 as represented by an amino acid sequence of the formula [VLI]D[RQKN]VEFSEVMVIHRMYV[N]RL[SAT]DL[NDQE]V[GA][EQND]L[PED]GA[EGD][RK]VKR[VLI]YV[FLIV]ADVVE (SEQ ID NO: 699); an amino acid sequence MOTIF 8 as represented by an amino acid sequence of the formula A[DE]RELQMESFH[SAT]AVISQ[RK]R[QGEND]EL[NDQE][TDSE][ATS][IFLV]AKM[DE]R[LMI V]SLQMEEE[NSDQET][RGK]AMEQA[QRNK]KEM (SEQ ID NO: 700); an amino acid sequence MOTIF 9 as represented by an amino acid sequence of the formula F[VLI]TAGATAPGA[AVIL]ASAGQAV[SNTQ]IAGQAAQ[AG]LRRVVEILE[GQN]LEAVMEVVA A[VIL]K (SEQ ID NO: 701); an amino acid sequence MOTIF 10 as represented by an amino acid sequence of the formula D[GDE][MA][NKQK]WG[ITLVS]Y[IVL][YH][GA]E[KERD]V[EQND][RVLKI]SPL[LYFIV][PNQ][S NGTQ][NWQ][ASPT][IYLV]L[AGVIL]V[WED]A[DQNE]R[CST][TISLV]IT[SAT]A[RFMK]HN[HV TILS][VFIL][NDQE][AERDK]PG[RWK][IVL][IRLVK] (SEQ ID NO: 702); an amino acid sequence MOTIF 11 as represented by an amino acid sequence of the formula [KVRIL][VKRIL][CA][RGCK][PHY]PSP[DE][MILV][MVIL]SAV[AG][EVDIL]HA[LINVQ]WL[NSQ T][DKER]VLL[QRNK]VVQ[KNRQ]ES[QHN][LMIV]QGT[AED][PSAT]YNECLALLGR (SEQ ID NO: 703); an amino acid sequence MOTIF 12 as represented by an amino acid sequence of the formula [PNQ]T[EQDN]LT[VATILS]WPL[GRK]MDTV[AG][NDQE]LLI[ATS][QHN]E[NSQT]AAL[VLSIT]GL[ITMALVS]QLG[PQN][SPT]S (SEQ ID NO: 704); an amino acid sequence MOTIF 13 as represented by an amino acid sequence of the formula [RLCKIV][DLWKEIVR][QNPRK][MTP][HQR][MILV]PGSVTVI[IVL]LCRLLQFP[ITLVS][DGE]G[SRTK][QFRNK][AST][TADES][TWS] (SEQ ID NO: 705); an amino acid sequence MOTIF 14 as represented by an amino acid sequence of the formula [TA][SGVTIL][ILV]PV[ED]VVTDP[SNTQ]IL[LMIV]GMQT[TS]V[LHIV]IAEL (SEQ ID NO: 706); an amino acid sequence MOTIF 15 as represented by an amino acid sequence of the formula EGLR[EQND]FQN[REKD]QVA[RNKQ]A[VLI]FAVL[KSRT][AST]VA[MQN]I[AG] (SEQ ID NO: 707); an amino acid sequence MOTIF 16 as represented by an amino acid sequence of the formula W[TS]RVRIRHLEM[QHN]F[AVIL][QKNR]E[AST][SMT][GNQ] (SEQ ID NO: 708); an amino acid sequence MOTIF 17 as represented by an amino acid sequence of the formula Q[IMLV]S[EQND]LQY[ED]IWVQG[LMIV][MLIV]RD[IMLV]A (SEQ ID NO: 709); an amino acid sequence MOTIF 18 as represented by an amino acid sequence of the formula TFTLGSGVTGITSMHGEPSLDPWNGVSLDSASPTAF (SEQ ID NO: 663); an amino acid sequence MOTIF 19 as represented by an amino acid sequence of the formula [MLVI]DY[SKTR][TSKR]L[YF][REKD]DLNQIS (SEQ ID NO: 710); an amino acid sequence MOTIF 20 as represented by an amino acid sequence of the formula L[RHQKN]L[PTS]FM[QKNR]LHA[RITKLVS][VQLIN][IRLVK]E[QERNDK][NFQ][VRILK][KWSR T][SETD] (SEQ ID NO: 711); an amino acid sequence MOTIF 21 as represented by an amino acid sequence of the formula V[DNQE][SAT]L[ED]QV[GST][QHN][ILV]V[GDE]AP (SEQ ID NO: 712); an amino acid sequence MOTIF 22 as represented by an amino acid sequence of the formula [IVL][EQHND][CAST][VAIL][MILV]K[IMLV][GVIL][RPK][FILV][VGIL][SLTIV]VV (SEQ ID NO: 713); an amino acid sequence MOTIF 23 as represented by an amino acid sequence of the formula TLTN[EQDN]PSE[EQDHN]F (SEQ ID NO: 714); and an amino acid sequence MOTIF 24 as represented by an amino acid sequence of the formula LP[RSKT]QS[RTKS]N[IVL]SF (SEQ ID NO: 715).

[0068] In some embodiments the nucleic acid molecule encodes a PtIP-83 polypeptide comprises an amino acid sequence MOTIF selected from: an amino acid sequence MOTIF 1 having at least 90% sequence identity to the amino acid sequence as represented by the formula MP[DE]MP[ST][ED]ADWSIFVNE[IVL]EAVAEGMPTEVSEVP[AVIL]W[KR]AKCKN[MVIL]AAL GREM[SCT]I (SEQ ID NO: 693); an amino acid sequence MOTIF 2 having at least 90% sequence identity to the amino acid sequence as represented by the formula PQLQYRMYG[NS]LI[KRNQ]QMAQVAQNYD[QRNK][ED]FK[QRNK][FL][KR]LFI[IAVL]QNQI[L FIV]GSYLL[QEND]QN[KR]AF (SEQ ID NO: 694); an amino acid sequence MOTIF 3 having at least 90% sequence identity to the amino acid sequence as represented by the formula N[TKSR]FMQMTPFT[RHK]WRLRLSASA[SPKATR]EN[AKR][EG]LAFPTATA[PLIV]DSTT[EQ ND][IVL][VAIL]ITFHVTAIR (SEQ ID NO: 695); an amino acid sequence MOTIF 4 having at least 90% sequence identity to the amino acid sequence as represented by the formula [DNQE]FTSRHVVK[GDE]IPV[SNTQ]LLLDG[EGD]DWEFEIPVQ[AG]GMSSFP (SEQ ID NO: 696); an amino acid sequence MOTIF 5 having at least 90% sequence identity to the amino acid sequence as represented by the formula IIHQP[SAT]T[RQKN][ST]G[ITLVS][VIL]YILLQGST[IVL]FHDRRR[DE][EQDN]V[MLIV]T[FP]QA A[DAVEIL]PLN[FY][QHN]YAYRLDTG (SEQ ID NO: 697); an amino acid sequence MOTIF 6 having at least 90% sequence identity to the amino acid sequence as represented by the formula S[HQN]ADRLAAIQP[AVIL][DN]LTN[HYF]LEMAT[HQN]MDMRTT[RSKT][MILV]L[ILV]GLLN[M ILV][LMIV]RIQNAAL[MRILVK]YEY (SEQ ID NO: 698); an amino acid sequence MOTIF 7 having at least 90% sequence identity to the amino acid sequence as represented by the formula [VLI]D[RQKN]VEFSEVMVIHRMYV[N]RL[SAT]DL[NDQE]V[GA][EQND]L[PED]GA[EGD][RK]VKR[VLI]YV[FLIV]ADVVE (SEQ ID NO: 699); an amino acid sequence MOTIF 8 having at least 90% sequence identity to the amino acid sequence as represented by the formula A[DE]RELQMESFH[SAT]AVISQ[RK]R[QGEND]EL[NDQE][TDSE][ATS][IFLV]AKM[DE]R[LMI V]SLQMEEE[NSDQET][RGK]AMEQA[QRNK]KEM (SEQ ID NO: 700); an amino acid sequence MOTIF 9 having at least 90% sequence identity to the amino acid sequence as represented by the formula F[VLI]TAGATAPGA[AVIL]ASAGQAV[SNTQ]IAGQAAQ[AG]LRRVVEILE[GQN]LEAVMEVVA A[VIL]K (SEQ ID NO: 701); an amino acid sequence MOTIF 10 having at least 90% sequence identity to the amino acid sequence as represented by the formula D[GDE][MA][NKQK]WG[ITLVS]Y[IVL][YH][GA]E[KERD]V[EQND][RVLKI]SPL[LYFIV][PNQ][S NGTQ][NWQ][ASPT][IYLV]L[AGVIL]V[WED]A[DQNE]R[CST][TISLV]IT[SAT]A[RFMK]HN[HV TILS][VFIL][NDQE][AERDK]PG[RWK][IVL][IRLVK] (SEQ ID NO: 702); an amino acid sequence MOTIF 11 having at least 90% sequence identity to the amino acid sequence as represented by the formula [KVRIL][VKRIL][CA][RGCK][PHY]PSP[DE][MILV][MVIL]SAV[AG][EVDIL]HA[LINVQ]WL[NSQ T][DKER]VLL[QRNK]VVQ[KNRQ]ES[QHN][LMIV]QGT[AED][PSAT]YNECLALLGR (SEQ ID NO: 703); an amino acid sequence MOTIF 12 having at least 90% sequence identity to the amino acid sequence as represented by the formula [PNQ]T[EQDN]LT[VATILS]WPL[GRK]MDTV[AG][NDQE]LLI[ATS][QHN]E[NSQT]AAL[VLSIT]GL[ITMALVS]QLG[PQN][SPT]S (SEQ ID NO: 704); an amino acid sequence MOTIF 13 having at least 90% sequence identity to the amino acid sequence as represented by the formula [RLCKIV][DLWKEIVR][QNPRK][MTP][HQR][MILV]PGSVTVI[IVL]LCRLLQFP[ITLVS][DGE]G[SRTK][QFRNK][AST][TADES][TWS] (SEQ ID NO: 705); an amino acid sequence MOTIF 14 having at least 90% sequence identity to the amino acid sequence as represented by the formula [TA][SGVTIL][ILV]PV[ED]VVTDP[SNTQ]IL[LMIV]GMQT[TS]V[LHIV]IAEL (SEQ ID NO: 706); an amino acid sequence MOTIF 15 having at least 90% sequence identity to the amino acid sequence as represented by the formula EGLR[EQND]FQN[REKD]QVA[RNKQ]A[VLI]FAVL[KSRT][AST]VA[MQN]I[AG] (SEQ ID NO: 707); an amino acid sequence MOTIF 16 having at least 90% sequence identity to the amino acid sequence as represented by the formula W[TS]RVRIRHLEM[QHN]F[AVIL][QKNR]E[AST][SMT][GNQ] (SEQ ID NO: 708); an amino acid sequence MOTIF 17 having at least 90% sequence identity to the amino acid sequence as represented by the formula Q[IMLV]S[EQND]LQY[ED]IWVQG[LMIV][MLIV]RD[IMLV]A (SEQ ID NO: 709); an amino acid sequence MOTIF 18 having at least 90% sequence identity to the amino acid sequence as represented by the formula TFTLGSGVTGITSMHGEPSLDPWNGVSLDSASPTAF (SEQ ID NO: 663); an amino acid sequence MOTIF 19 having at least 90% sequence identity to the amino acid sequence as represented by the formula [MLVI]DY[SKTR][TSKR]L[YF][REKD]DLNQIS (SEQ ID NO: 710); an amino acid sequence MOTIF 20 having at least 90% sequence identity to the amino acid sequence as represented by the formula L[RHQKN]L[PTS]FM[QKNR]LHA[RITKLVS][VQLIN][IRLVK]E[QERNDK][NFQ][VRILK][KWSR T][SETD] (SEQ ID NO: 711); an amino acid sequence MOTIF 21 having at least 90% sequence identity to the amino acid sequence as represented by the formula V[DNQE][SAT]L[ED]QV[GST][QHN][ILV]V[GDE]AP (SEQ ID NO: 712); an amino acid sequence MOTIF 22 having at least 90% sequence identity to the amino acid sequence as represented by the formula [IVL][EQHND][CAST][VAIL][MILV]K[IMLV][GVIL][RPK][FILV][VGIL][SLTIV]VV (SEQ ID NO: 713); an amino acid sequence MOTIF 23 having at least 90% sequence identity to the amino acid sequence as represented by the formula TLTN[EQDN]PSE[EQDHN]F (SEQ ID NO: 714); and an amino acid sequence MOTIF 24 having at least 90% sequence identity to the amino acid sequence as represented by the formula LP[RSKT]QS[RTKS]N[IVL]SF (SEQ ID NO: 715).

[0069] In some embodiments the nucleic acid molecule encodes a PtIP-83 polypeptide comprising, sequentially from the N-terminus to the C-terminus, an amino acid sequence MOTIF selected from: MOTIF 19 (SEQ ID NO: 664, SEQ ID NO: 687 or SEQ ID NO: 710), MOTIF 7 (SEQ ID NO: 652, SEQ ID NO: 676 or SEQ ID NO: 699), MOTIF 13 (SEQ ID NO: 658, SEQ ID NO: 682 or SEQ ID NO: 705), MOTIF 20 (SEQ ID NO: 665, SEQ ID NO: 688 or SEQ ID NO: 711), MOTIF 10 (SEQ ID NO: 655, SEQ ID NO: 679 or SEQ ID NO: 702), MOTIF 18 (SEQ ID NO: 663), MOTIF 24 (SEQ ID NO: 669, SEQ ID NO: 692 or SEQ ID NO: 715), MOTIF 14 (SEQ ID NO: 659, SEQ ID NO: 683 or SEQ ID NO: 706), MOTIF 11 (SEQ ID NO: 656, SEQ ID NO: 680 or SEQ ID NO: 703), MOTIF 22 (SEQ ID NO: 667, SEQ ID NO: 690 or SEQ ID NO: 713), MOTIF 2 (SEQ ID NO: 647, SEQ ID NO: 671 or SEQ ID NO: 694), MOTIF 8 (SEQ ID NO: 653, SEQ ID NO: 677 or SEQ ID NO: 700), MOTIF 15 (SEQ ID NO: 660, SEQ ID NO: 684 or SEQ ID NO: 707), MOTIF 9 (SEQ ID NO: 654, SEQ ID NO: 678 or SEQ ID NO: 701), MOTIF 21 (SEQ ID NO: 666, SEQ ID NO: 689 or SEQ ID NO: 712), MOTIF 1 (SEQ ID NO: 646, SEQ ID NO: 670 or SEQ ID NO: 693), MOTIF 17 (SEQ ID NO: 662, SEQ ID NO: 686 or SEQ ID NO: 709), MOTIF 6 (SEQ ID NO: 651, SEQ ID NO: 675 or SEQ ID NO: 698), MOTIF 12 (SEQ ID NO: 657, SEQ ID NO: 681 or SEQ ID NO: 704), MOTIF 4 (SEQ ID NO: 649, SEQ ID NO: 673 or SEQ ID NO: 696), MOTIF 16 (SEQ ID NO: 661, SEQ ID NO: 685 or SEQ ID NO: 708), MOTIF 5 (SEQ ID NO: 650, SEQ ID NO: 674 or SEQ ID NO: 697), MOTIF 23 (SEQ ID NO: 668, SEQ ID NO: 691 or SEQ ID NO: 714), and MOTIF 3 (SEQ ID NO: 648, SEQ ID NO: 672 or SEQ ID NO: 695).

[0070] In some embodiments the nucleic acid molecule encodes a PtIP-83 polypeptide comprising, sequentially from the N-terminus to the C-terminus, an amino acid sequence MOTIF selected from: MOTIF 19 (SEQ ID NO: 664, SEQ ID NO: 687 or SEQ ID NO: 710), MOTIF 7 (SEQ ID NO: 652, SEQ ID NO: 676 or SEQ ID NO: 699), MOTIF 13 (SEQ ID NO: 658, SEQ ID NO: 682 or SEQ ID NO: 705), MOTIF 20 (SEQ ID NO: 665, SEQ ID NO: 688 or SEQ ID NO: 711), MOTIF 14 (SEQ ID NO: 659, SEQ ID NO: 683 or SEQ ID NO: 706), MOTIF 2 (SEQ ID NO: 647, SEQ ID NO: 671 or SEQ ID NO: 694), MOTIF 8 (SEQ ID NO: 653, SEQ ID NO: 677 or SEQ ID NO: 700), MOTIF 15 (SEQ ID NO: 660, SEQ ID NO: 684 or SEQ ID NO: 707), MOTIF 9 (SEQ ID NO: 654, SEQ ID NO: 678 or SEQ ID NO: 701), MOTIF 21 (SEQ ID NO: 666, SEQ ID NO: 689 or SEQ ID NO: 712), MOTIF 1 (SEQ ID NO: 646, SEQ ID NO: 670 or SEQ ID NO: 693), MOTIF 17 (SEQ ID NO: 662, SEQ ID NO: 686 or SEQ ID NO: 709), MOTIF 6 (SEQ ID NO: 651, SEQ ID NO: 675 or SEQ ID NO: 698), MOTIF 12 (SEQ ID NO: 657, SEQ ID NO: 681 or SEQ ID NO: 704), MOTIF 4 (SEQ ID NO: 649, SEQ ID NO: 673 or SEQ ID NO: 696), MOTIF 16 (SEQ ID NO: 661, SEQ ID NO: 685 or SEQ ID NO: 708), MOTIF 5 (SEQ ID NO: 650, SEQ ID NO: 674 or SEQ ID NO: 697), MOTIF 23 (SEQ ID NO: 668, SEQ ID NO: 691 or SEQ ID NO: 714), and MOTIF 3 (SEQ ID NO: 648, SEQ ID NO: 672 or SEQ ID NO: 695).

[0071] In some embodiments the nucleic acid molecule encodes a PtIP-83 polypeptide comprising, sequentially from the N-terminus to the C-terminus, the amino acid sequence motifs: MOTIF 19 (SEQ ID NO: 664, SEQ ID NO: 687 or SEQ ID NO: 710), MOTIF 7 (SEQ ID NO: 652, SEQ ID NO: 676 or SEQ ID NO: 699), MOTIF 13 (SEQ ID NO: 658, SEQ ID NO: 682 or SEQ ID NO: 705), MOTIF 20 (SEQ ID NO: 665, SEQ ID NO: 688 or SEQ ID NO: 711), MOTIF 10 (SEQ ID NO: 655, SEQ ID NO: 679 or SEQ ID NO: 702), MOTIF 18 (SEQ ID NO: 663), MOTIF 24 (SEQ ID NO: 669, SEQ ID NO: 692 or SEQ ID NO: 715), MOTIF 14 (SEQ ID NO: 659, SEQ ID NO: 683 or SEQ ID NO: 706), MOTIF 11 (SEQ ID NO: 656, SEQ ID NO: 680 or SEQ ID NO: 703), MOTIF 22 (SEQ ID NO: 667, SEQ ID NO: 690 or SEQ ID NO: 713), MOTIF 2 (SEQ ID NO: 647, SEQ ID NO: 671 or SEQ ID NO: 694), MOTIF 8 (SEQ ID NO: 653, SEQ ID NO: 677 or SEQ ID NO: 700), MOTIF 15 (SEQ ID NO: 660, SEQ ID NO: 684 or SEQ ID NO: 707), MOTIF 9 (SEQ ID NO: 654, SEQ ID NO: 678 or SEQ ID NO: 701), MOTIF 21 (SEQ ID NO: 666, SEQ ID NO: 689 or SEQ ID NO: 712), MOTIF 1 (SEQ ID NO: 646, SEQ ID NO: 670 or SEQ ID NO: 693), MOTIF 17 (SEQ ID NO: 662, SEQ ID NO: 686 or SEQ ID NO: 709), MOTIF 6 (SEQ ID NO: 651, SEQ ID NO: 675 or SEQ ID NO: 698), MOTIF 12 (SEQ ID NO: 657, SEQ ID NO: 681 or SEQ ID NO: 704), MOTIF 4 (SEQ ID NO: 649, SEQ ID NO: 673 or SEQ ID NO: 696), MOTIF 16 (SEQ ID NO: 661, SEQ ID NO: 685 or SEQ ID NO: 708), MOTIF 5 (SEQ ID NO: 650, SEQ ID NO: 674 or SEQ ID NO: 697), MOTIF 23 (SEQ ID NO: 668, SEQ ID NO: 691 or SEQ ID NO: 714), and MOTIF 3 (SEQ ID NO: 648, SEQ ID NO: 672 or SEQ ID NO: 695).

[0072] In some embodiments the nucleic acid molecule encodes a PtIP-83 polypeptide comprising, sequentially from the N-terminus to the C-terminus, the amino acid sequence motifs: MOTIF 19 (SEQ ID NO: 664, SEQ ID NO: 687 or SEQ ID NO: 710), MOTIF 7 (SEQ ID NO: 652, SEQ ID NO: 676 or SEQ ID NO: 699), MOTIF 13 (SEQ ID NO: 658, SEQ ID NO: 682 or SEQ ID NO: 705), MOTIF 20 (SEQ ID NO: 665, SEQ ID NO: 688 or SEQ ID NO: 711), MOTIF 14 (SEQ ID NO: 659, SEQ ID NO: 683 or SEQ ID NO: 706), MOTIF 2 (SEQ ID NO: 647, SEQ ID NO: 671 or SEQ ID NO: 694), MOTIF 8 (SEQ ID NO: 653, SEQ ID NO: 677 or SEQ ID NO: 700), MOTIF 15 (SEQ ID NO: 660, SEQ ID NO: 684 or SEQ ID NO: 707), MOTIF 9 (SEQ ID NO: 654, SEQ ID NO: 678 or SEQ ID NO: 701), MOTIF 21 (SEQ ID NO: 666, SEQ ID NO: 689 or SEQ ID NO: 712), MOTIF 1 (SEQ ID NO: 646, SEQ ID NO: 670 or SEQ ID NO: 693), MOTIF 17 (SEQ ID NO: 662, SEQ ID NO: 686 or SEQ ID NO: 709), MOTIF 6 (SEQ ID NO: 651, SEQ ID NO: 675 or SEQ ID NO: 698), MOTIF 12 (SEQ ID NO: 657, SEQ ID NO: 681 or SEQ ID NO: 704), MOTIF 4 (SEQ ID NO: 649, SEQ ID NO: 673 or SEQ ID NO: 696), MOTIF 16 (SEQ ID NO: 661, SEQ ID NO: 685 or SEQ ID NO: 708), MOTIF 5 (SEQ ID NO: 650, SEQ ID NO: 674 or SEQ ID NO: 697), MOTIF 23 (SEQ ID NO: 668, SEQ ID NO: 691 or SEQ ID NO: 714), and MOTIF 3 (SEQ ID NO: 648, SEQ ID NO: 672 or SEQ ID NO: 695).

[0073] In some embodiments the nucleic acid molecule encodes a PtIP-83 polypeptide comprising sequentially from the N-terminus to the C-terminus: a Region A of between about 200 to about 300 amino acids in length comprising an amino acid sequence MOTIF of: MOTIF 19 (SEQ ID NO: 664, SEQ ID NO: 687 or SEQ ID NO: 710), MOTIF 7 (SEQ ID NO: 652, SEQ ID NO: 676 or SEQ ID NO: 699), MOTIF 13 (SEQ ID NO: 658, SEQ ID NO: 682 or SEQ ID NO: 705), MOTIF 20 (SEQ ID NO: 665, SEQ ID NO: 688 or SEQ ID NO: 711), MOTIF 10 (SEQ ID NO: 655, SEQ ID NO: 679 or SEQ ID NO: 702), MOTIF 18 (SEQ ID NO: 663), MOTIF 24 (SEQ ID NO: 669, SEQ ID NO: 692 or SEQ ID NO: 715), and/or MOTIF 14 having a predominantly nonconserved secondary structure; a Region B of between about 380 to about 465 amino acids in length comprising an amino acid sequence MOTIF of MOTIF 22 (SEQ ID NO: 667, SEQ ID NO: 690 or SEQ ID NO: 713), MOTIF 2 (SEQ ID NO: 647, SEQ ID NO: 671 or SEQ ID NO: 694), MOTIF 8 (SEQ ID NO: 653, SEQ ID NO: 677 or SEQ ID NO: 700), MOTIF 15 (SEQ ID NO: 660, SEQ ID NO: 684 or SEQ ID NO: 707), MOTIF 9 (SEQ ID NO: 654, SEQ ID NO: 678 or SEQ ID NO: 701), MOTIF 21 (SEQ ID NO: 666, SEQ ID NO: 689 or SEQ ID NO: 712), MOTIF 1 (SEQ ID NO: 646, SEQ ID NO: 670 or SEQ ID NO: 693), MOTIF 17 (SEQ ID NO: 662, SEQ ID NO: 686 or SEQ ID NO: 709), MOTIF 6 (SEQ ID NO: 651, SEQ ID NO: 675 or SEQ ID NO: 698), and/or MOTIF 12 and having a predominately alpha helical structure; and a Region C of between about 150 to about 180 amino acids in length comprising an amino acid sequence MOTIF of MOTIF 16 (SEQ ID NO: 661, SEQ ID NO: 685 or SEQ ID NO: 708), MOTIF 5 (SEQ ID NO: 650, SEQ ID NO: 674 or SEQ ID NO: 697), MOTIF 23 (SEQ ID NO: 668, SEQ ID NO: 691 or SEQ ID NO: 714), and/or MOTIF 3 (SEQ ID NO: 648, SEQ ID NO: 672 or SEQ ID NO: 695), having a consensus secondary structure comprising predominately beta strand structure.

[0074] In some embodiments the PtIP-83 polypeptide comprises an amino acid sequence MOTIF at the positions as shown in Table 2.

[0075] In some embodiments the nucleic acid molecule encodes a PtIP-83 polypeptide comprising sequentially from the N-terminus to the C-terminus: a Region A of between about 200 to about 300 amino acids in length having a predominantly nonconserved secondary structure; a Region B of between about 380 to about 465 amino acids in length having a consensus secondary structure comprising 8 to 10 segments of predominately alpha helical structure; and a Region C of between about 150 to about 180 amino acids in length having a consensus secondary structure comprising 6 to 8 segments of predominately beta strand structure. As used herein “predominantly nonconserved secondary structure” means that the regions of secondary structure don't consistently align within the family of PtIP polypeptides. As used herein “predominately alpha helical structure” means that secondary structure prediction may have one or more gap of between 1 to 6 amino acids of coil and/or beta strand structure intervening in the alpha helix structure. As used herein “predominately beta strand structure” means that secondary structure prediction may have one or more gap of between 1 to 6 amino acids of coil and/or alpha helix structure intervening in the beta strand structure. In some embodiments the secondary structure is generated by the PSIPRED, top ranked secondary structure prediction method (Jones D T. (1999) J. Mol. Biol. 292: 195-202).

[0076] In some embodiments the nucleic acid molecule encodes a PtIP-83 polypeptide comprising sequentially from the N-terminus to the C-terminus: a Region A of between about 200 to about 300 amino acids in length having a predominantly nonconserved secondary structure; a Region B of between about 380 to about 465 amino acids in length having a consensus secondary structure comprising nine segments of predominately alpha helical structure; and a Region C of between about 150 to about 180 amino acids in length having a consensus secondary structure comprising seven segments of predominately beta strand structure.

[0077] In some embodiments the nucleic acid molecule encodes a PtIP-83 polypeptide comprising sequentially from the N-terminus to the C-terminus: a Region A of between about 200 to about 300 amino acids in length having a predominantly nonconserved secondary structure, wherein the Region A comprises a conserved beta strand 1 (β1a) of between about 4 and about 12 amino acids in length within about amino acid residue 30 to about amino acid residue 130 from the N-terminus of the PtIP-83 polypeptide; a Region B of between about 380 to about 465 amino acids in length having a consensus secondary structure comprising nine segments of predominately alpha helical structure; and a Region C of between about 150 to about 180 amino acids in length having a consensus secondary structure comprising seven segments of predominately beta strand structure.

[0078] In some embodiments the nucleic acid molecule encodes a PtIP-83 polypeptide comprising sequentially from the N-terminus to the C-terminus: a Region A of between about 200 to about 300 amino acids in length having a flexible consensus secondary structure, wherein the Region A comprises a conserved beta strand 1 (β1a) of between about 4 and about 12 amino acids in length, a coil of between about 3 and about 18 amino acids in length and a beta strand 2 (β1b) of between about 4 and about 32 amino acids in length, within about amino acid residue 50 to about amino acid residue 165 from the N-terminus of the PtIP-83 polypeptide; a Region B of between about 380 to about 465 amino acids in length having a consensus secondary structure comprising nine segments of predominately alpha helical structure; and a Region C of between about 150 to about 180 amino acids in length having a consensus secondary structure comprising seven segments of predominately beta strand structure.

[0079] In some embodiments the nucleic acid molecule encodes a PtIP-83 polypeptide comprising sequentially from the N-terminus to the C-terminus: a Region A of between about 200 to about 300 amino acids in length having a predominantly nonconserved secondary structure; a Region B of between about 380 to about 465 amino acids in length having a consensus secondary structure comprising sequentially: i) an alpha helix-1 of between about 10 and about 26 amino acids in length; ii) a coil-1 of between about 2 and about 8 amino acids in length flanked by alpha helix-1 and alpha helix-2; iii) an alpha helix-2 of between about 15 and about 24 amino acids in length; iv) a coil-2 of between about 4 and about 14 amino acids in length flanked by alpha helix-2 and alpha helix-3; v) an alpha helix 3 of between about 15 and about 27 amino acids in length; vi) a coil-3 of between about 11 and about 13 amino acids in length flanked by alpha helix-3 and alpha helix-4; vii) an alpha helix-4 of about 24 180 amino acids in length; viii) a coil-4 of between about 4 and about 5 amino acids in length flanked by alpha helix-4 and alpha helix-5; ix) an alpha helix-5 of between about 50 and about 54 amino acids in length; x) a coil-5 of between about 11 and about 17 amino acids in length flanked by alpha helix-5 and alpha helix-6; xi) an alpha helix-6 of between about 15 and about 16 amino acids in length; xii) a coil-6 of between about 6 and about 9 amino acids in length flanked by alpha helix-6 and alpha helix-7; xiii) an alpha helix-7 of between about 49 and about 55 amino acids in length; xiv) a coil-7 of between about 3 and about 8 amino acids in length flanked by alpha helix-7 and alpha helix-8; xv) an alpha helix-8 of between about 33 and about 36 amino acids in length; xvi) a coil-8 of between about 14 and about 16 amino acids in length flanked by alpha helix-8 and alpha helix-9; xvii) an alpha helix-9 of between about 16 and about 23 amino acids in length; xviii) a coil-9 of between about 21 and about 28 amino acids in length flanked by alpha helix-9 and Region C; and a Region C of between about 150 to about 180 amino acids in length having a consensus secondary structure comprising seven segments of predominately beta strand structure.

[0080] In some embodiments the nucleic acid molecule encodes a PtIP-83 polypeptide comprising sequentially from the N-terminus to the C-terminus: a Region A of between about 200 to about 300 amino acids in length having a predominantly nonconserved secondary structure; a Region B of between about 380 to about 465 amino acids in length having a consensus secondary structure comprising nine segments of predominately alpha helical structure; and a Region C of between about 150 to about 180 amino acids in length having a consensus secondary structure comprising sequentially: i) a beta strand-1 (β1) of between about 3 amino acids and about 5 amino acids in length; ii) a coil of between about 13 amino acids and about 17 amino acids in length; iii) a beta strand-2 (β2) of between about 7 amino acids and about 11 amino acids in length; iv) a coil of between about 17 amino acids and about 23 amino acids in length; v) a beta strand-3 (β3) of between about 5 amino acids and about 7 amino acids in length; vi) a coil of between about 12 amino acids and about 14 amino acids in length; vii) a beta strand-4 (β4) of between about 5 amino acids and about 6 amino acids in length; viii) a coil of between about 2 amino acids and about 7 amino acids in length; ix) a beta strand-5 (β5) of between about 5 amino acids and about 7 amino acids in length; x) a coil of between about 26 amino acids and about 28 amino acids in length; xi) a beta strand-6 (β6) of between about 5 amino acids and about 7 amino acids in length; xii) a coil of between about 16 amino acids and about 20 amino acids in length; and xiii) a beta strand-1 (β7) of between about 13 amino acids and about 17 amino acids in length.

[0081] In some embodiments the nucleic acid molecule encodes a PtIP-83 polypeptide comprising sequentially from the N-terminus to the C-terminus: a Region A of between about 200 to about 300 amino acids in length having a predominantly nonconserved secondary structure; a Region B of between about 380 to about 465 amino acids in length having a consensus secondary structure comprising sequentially: i) an alpha helix-1 of between about 10 and about 26 amino acids in length; ii) a coil-1 of between about 2 and about 8 amino acids in length flanked by alpha helix-1 and alpha helix-2; iii) an alpha helix-2 of between about 15 and about 24 amino acids in length; iv) a coil-2 of between about 4 and about 14 amino acids in length flanked by alpha helix-2 and alpha helix-3; v) an alpha helix 3 of between about 15 and about 27 amino acids in length; vi) a coil-3 of between about 11 and about 13 amino acids in length flanked by alpha helix-3 and alpha helix-4; vii) an alpha helix-4 of about 24 180 amino acids in length; viii) a coil-4 of between about 4 and about 5 amino acids in length flanked by alpha helix-4 and alpha helix-5; ix) an alpha helix-5 of between about 50 and about 54 amino acids in length; x) a coil-5 of between about 11 and about 17 amino acids in length flanked by alpha helix-5 and alpha helix-6; xi) an alpha helix-6 of between about 15 and about 16 amino acids in length; xii) a coil-6 of between about 6 and about 9 amino acids in length flanked by alpha helix-6 and alpha helix-7; xiii) an alpha helix-7 of between about 49 and about 55 amino acids in length; xiv) a coil-7 of between about 3 and about 8 amino acids in length flanked by alpha helix-7 and alpha helix-8; xv) an alpha helix-8 of between about 33 and about 36 amino acids in length; xvi) a coil-8 of between about 14 and about 16 amino acids in length flanked by alpha helix-8 and alpha helix-9; xvii) an alpha helix-9 of between about 16 and about 23 amino acids in length; xviii) a coil-9 of between about 21 and about 28 amino acids in length flanked by alpha helix-9 and Region C; and a Region C of between about 150 to about 180 amino acids in length having a consensus secondary structure comprising sequentially: i) a beta strand-1 (β1) of between about 3 amino acids and about 5 amino acids in length; ii) a coil of between about 13 amino acids and about 17 amino acids in length; iii) a beta strand-2 (β2) of between about 7 amino acids and about 11 amino acids in length; iv) a coil of between about 17 amino acids and about 23 amino acids in length; v) a beta strand-3 (β3) of between about 5 amino acids and about 7 amino acids in length; vi) a coil of between about 12 amino acids and about 14 amino acids in length; vii) a beta strand-4 (β4) of between about 5 amino acids and about 6 amino acids in length; viii) a coil of between about 2 amino acids and about 7 amino acids in length; ix) a beta strand-5 (β5) of between about 5 amino acids and about 7 amino acids in length; x) a coil of between about 26 amino acids and about 28 amino acids in length; xi) a beta strand-6 (β6) of between about 5 amino acids and about 7 amino acids in length; xii) a coil of between about 16 amino acids and about 20 amino acids in length; and xiii) a beta strand-1 (β7) of between about 13 amino acids and about 17 amino acids in length.

[0082] In some embodiments the nucleic acid molecule encodes a PtIP-83 polypeptide comprising sequentially from the N-terminus to the C-terminus: a Region A of between about 200 to about 300 amino acids in length having a flexible consensus secondary structure, wherein the Region A comprises a conserved beta strand 1 (β1a) of between about 4 and about 12 amino acids in length within about amino acid residue 30 to about amino acid residue 130 from the N-terminus of the PtIP-83 polypeptide; a Region B of between about 380 to about 465 amino acids in length having a consensus secondary structure comprising sequentially: i) an alpha helix-1 of between about 10 and about 26 amino acids in length; ii) a coil-1 of between about 2 and about 8 amino acids in length flanked by alpha helix-1 and alpha helix-2; iii) an alpha helix-2 of between about 15 and about 24 amino acids in length; iv) a coil-2 of between about 4 and about 14 amino acids in length flanked by alpha helix-2 and alpha helix-3; v) an alpha helix 3 of between about 15 and about 27 amino acids in length; vi) a coil-3 of between about 11 and about 13 amino acids in length flanked by alpha helix-3 and alpha helix-4; vii) an alpha helix-4 of about 24 180 amino acids in length; viii) a coil-4 of between about 4 and about 5 amino acids in length flanked by alpha helix-4 and alpha helix-5; ix) an alpha helix-5 of between about 50 and about 54 amino acids in length; x) a coil-5 of between about 11 and about 17 amino acids in length flanked by alpha helix-5 and alpha helix-6; xi) an alpha helix-6 of between about 15 and about 16 amino acids in length; xii) a coil-6 of between about 6 and about 9 amino acids in length flanked by alpha helix-6 and alpha helix-7; xiii) an alpha helix-7 of between about 49 and about 55 amino acids in length; xiv) a coil-7 of between about 3 and about 8 amino acids in length flanked by alpha helix-7 and alpha helix-8; xv) an alpha helix-8 of between about 33 and about 36 amino acids in length; xvi) a coil-8 of between about 14 and about 16 amino acids in length flanked by alpha helix-8 and alpha helix-9; xvii) an alpha helix-9 of between about 16 and about 23 amino acids in length; xviii) a coil-9 of between about 21 and about 28 amino acids in length flanked by alpha helix-9 and Region C; and a Region C of between about 150 to about 180 amino acids in length having a consensus secondary comprising sequentially: i) a beta strand-1 (β1) of between about 3 amino acids and about 5 amino acids in length; ii) a coil of between about 13 amino acids and about 17 amino acids in length; iii) a beta strand-2 (β2) of between about 7 amino acids and about 11 amino acids in length; iv) a coil of between about 17 amino acids and about 23 amino acids in length; v) a beta strand-3 (β3) of between about 5 amino acids and about 7 amino acids in length; vi) a coil of between about 12 amino acids and about 14 amino acids in length; vii) a beta strand-4 (β4) of between about 5 amino acids and about 6 amino acids in length; viii) a coil of between about 2 amino acids and about 7 amino acids in length; ix) a beta strand-5 (β5) of between about 5 amino acids and about 7 amino acids in length; x) a coil of between about 26 amino acids and about 28 amino acids in length; xi) a beta strand-6 (β6) of between about 5 amino acids and about 7 amino acids in length; xii) a coil of between about 16 amino acids and about 20 amino acids in length; and xiii) a beta strand-1 (β7) of between about 13 amino acids and about 17 amino acids in length.

[0083] Also provided are nucleic acid molecules that encode transcription and/or translation products that are subsequently spliced to ultimately produce functional PtIP-83 polypeptides. Splicing can be accomplished in vitro or in vivo, and can involve cis- or trans-splicing. The substrate for splicing can be polynucleotides (e.g., RNA transcripts) or polypeptides. An example of cis-splicing of a polynucleotide is where an intron inserted into a coding sequence is removed and the two flanking exon regions are spliced to generate a PtIP-83 polypeptide encoding sequence. An example of trans splicing would be where a polynucleotide is encrypted by separating the coding sequence into two or more fragments that can be separately transcribed and then spliced to form the full-length pesticidal encoding sequence. The use of a splicing enhancer sequence, which can be introduced into a construct, can facilitate splicing either in cis or trans-splicing of polypeptides (U.S. Pat. Nos. 6,365,377 and 6,531,316). Thus, in some embodiments the polynucleotides do not directly encode a full-length PtIP-83 polypeptide, but rather encode a fragment or fragments of a PtIP-83 polypeptide. These polynucleotides can be used to express a functional PtIP-83 polypeptide through a mechanism involving splicing, where splicing can occur at the level of polynucleotide (e.g., intron/exon) and/or polypeptide (e.g., intein/extein). This can be useful, for example, in controlling expression of pesticidal activity, since a functional pesticidal polypeptide will only be expressed if all required fragments are expressed in an environment that permits splicing processes to generate functional product. In another example, introduction of one or more insertion sequences into a polynucleotide can facilitate recombination with a low homology polynucleotide; use of an intron or intein for the insertion sequence facilitates the removal of the intervening sequence, thereby restoring function of the encoded variant.

[0084] Nucleic acid molecules that are fragments of these nucleic acid sequences encoding PtIP-83 polypeptides are also encompassed by the embodiments. “Fragment” as used herein refers to a portion of the nucleic acid sequence encoding a PtIP-83 polypeptide. A fragment of a nucleic acid sequence may encode a biologically active portion of a PtIP-83 polypeptide or it may be a fragment that can be used as a hybridization probe or PCR primer using methods disclosed below. Nucleic acid molecules that are fragments of a nucleic acid sequence encoding a PtIP-83 polypeptide comprise at least about 150, 180, 210, 240, 270, 300, 330 or 360, contiguous nucleotides or up to the number of nucleotides present in a full-length nucleic acid sequence encoding a PtIP-83 polypeptide disclosed herein, depending upon the intended use. “Contiguous nucleotides” is used herein to refer to nucleotide residues that are immediately adjacent to one another. Fragments of the nucleic acid sequences of the embodiments will encode protein fragments that retain the biological activity of the PtIP-83 polypeptide and, hence, retain insecticidal activity. “Retains insecticidal activity” is used herein to refer to a polypeptide having at least about 10%, at least about 30%, at least about 50%, at least about 70%, 80%, 90%, 95% or higher of the insecticidal activity of the full-length PtIP-83Aa polypeptide (SEQ ID NO: 1). In some embodiments, the insecticidal activity is Lepidoptera activity. In one embodiment, the insecticidal activity is against a Coleopteran species. In some embodiments, the insecticidal activity is against one or more insect pests of the corn rootworm complex: western corn rootworm, Diabrotica virgifera; northern corn rootworm, D. barberi: Southern corn rootworm or spotted cucumber beetle; Diabrotica undecimpunctata howardi, and the Mexican corn rootworm, D. virgifera zeae. In one embodiment, the insecticidal activity is against a Diabrotica species.

[0085] In some embodiments a fragment of a nucleic acid sequence encoding a PtIP-83 polypeptide encoding a biologically active portion of a protein will encode at least about 15, 20, 30, 50, 75, 100, 125, contiguous amino acids or up to the total number of amino acids present in a full-length PtIP-83 polypeptide of the embodiments. In some embodiments, the fragment is an N-terminal and/or a C-terminal truncation of at least about 1, 2, 3, 4, 5, 6, 7, 8, 9, 10, 11, 12, 13, 14, 15, 16, 17, 18, 19, 20, 21, 22, 23, 24, 25, 26, 27, 28, 29, 30, 31, 32, 33, 34 or more amino acids from the N-terminus and/or C-terminus relative to SEQ ID NO: 1, SEQ ID NO: 3, SEQ ID NO: 5, SEQ ID NO: 7, SEQ ID NO: 9, SEQ ID NO: 11, SEQ ID NO: 13, SEQ ID NO: 15, SEQ ID NO: 17, SEQ ID NO: 19, SEQ ID NO: 21, SEQ ID NO: 23 or SEQ ID NO: 716, SEQ ID NO: 754, SEQ ID NO: 755, SEQ ID NO: 756, SEQ ID NO: 757, SEQ ID NO: 758, SEQ ID NO: 759, SEQ ID NO: 760, SEQ ID NO: 761, SEQ ID NO: 762, SEQ ID NO: 763, SEQ ID NO: 764, SEQ ID NO: 765, SEQ ID NO: 766, SEQ ID NO: 767, SEQ ID NO: 768, SEQ ID NO: 769 or SEQ ID NOs: 958-1026, variants thereof, e.g., by proteolysis, insertion of a start codon, deletion of the codons encoding the deleted amino acids with the concomitant insertion of a stop codon or by insertion of a stop codon in the coding sequence. In some embodiments, the fragments encompassed herein result from the removal of the N-terminal 1, 2, 3, 4, 5, 6, 7, 8, 9, 10, 11, 12, 13, 14, 15, 16, 17, 18, 19, 20, 21, 22, 23, 24, 25 or more amino acids from the N-terminus relative to SEQ ID NO: 1, SEQ ID NO: 3, SEQ ID NO: 5, SEQ ID NO: 7, SEQ ID NO: 9, SEQ ID NO: 11, SEQ ID NO: 13, SEQ ID NO: 15, SEQ ID NO: 17, SEQ ID NO: 19, SEQ ID NO: 21, SEQ ID NO: 23, SEQ ID NO: 716, SEQ ID NO: 754, SEQ ID NO: 755, SEQ ID NO: 756, SEQ ID NO: 757, SEQ ID NO: 758, SEQ ID NO: 759, SEQ ID NO: 760, SEQ ID NO: 761, SEQ ID NO: 762, SEQ ID NO: 763, SEQ ID NO: 764, SEQ ID NO: 765, SEQ ID NO: 766, SEQ ID NO: 767, SEQ ID NO: 768, SEQ ID NO: 769, SEQ ID NOs: 958-1026, or variants thereof, e.g., by proteolysis or by insertion of a start codon in the coding sequence. In some embodiments, the fragments encompassed herein result from the removal of the N-terminal 1, 2, 3, 4, 5, 6, 7, 8, 9, 10, 11, 12, 13, 14 amino acids relative to SEQ ID NO: 1, SEQ ID NO: 3, SEQ ID NO: 5, SEQ ID NO: 7, SEQ ID NO: 9, SEQ ID NO: 11, SEQ ID NO: 13, SEQ ID NO: 15, SEQ ID NO: 17, SEQ ID NO: 19, SEQ ID NO: 21, SEQ ID NO: 23, SEQ ID NO: 716, SEQ ID NO: 754, SEQ ID NO: 755, SEQ ID NO: 756, SEQ ID NO: 757, SEQ ID NO: 758, SEQ ID NO: 759, SEQ ID NO: 760, SEQ ID NO: 761, SEQ ID NO: 762, SEQ ID NO: 763, SEQ ID NO: 764, SEQ ID NO: 765, SEQ ID NO: 766, SEQ ID NO: 767, SEQ ID NO: 768, SEQ ID NO: 769, or SEQ ID NOs: 958-1026, or variants thereof, e.g., by proteolysis or by insertion of a start codon in the coding sequence.

[0086] In some embodiments the PtIP-83 polypeptide is encoded by a nucleic acid sequence sufficiently homologous to the nucleic acid sequence of SEQ ID NO: 2, SEQ ID NO: 4, SEQ ID NO: 6, SEQ ID NO: 8, SEQ ID NO: 10, SEQ ID NO: 12, SEQ ID NO: 14, SEQ ID NO: 16, SEQ ID NO: 18, SEQ ID NO: 20, SEQ ID NO: 22, SEQ ID NO: 24, SEQ ID NO: 717, SEQ ID NO: 738, SEQ ID NO: 739, SEQ ID NO: 740, SEQ ID NO: 741, SEQ ID NO: 742, SEQ ID NO: 743, SEQ ID NO: 744, SEQ ID NO: 745, SEQ ID NO: 746, SEQ ID NO: 747, SEQ ID NO: 748, SEQ ID NO: 749, SEQ ID NO: 750, SEQ ID NO: 751, SEQ ID NO: 752, SEQ ID NO: 753, or SEQ ID NOs: 958-1026. “Sufficiently homologous” is used herein to refer to an amino acid or nucleic acid sequence that has at least about 50%, 55%, 60%, 65%, 70%, 75%, 80%, 81%, 82%, 83%, 84%, 85%, 86%, 87%, 88%, 89%, 90%, 91%, 92%, 93%, 94%, 95%, 96%, 97%, 98%, 99% or greater sequence homology compared to a reference sequence using one of the alignment programs described herein using standard parameters. One of skill in the art will recognize that these values can be appropriately adjusted to determine corresponding homology of proteins encoded by two nucleic acid sequences by taking into account codon degeneracy, amino acid similarity, reading frame positioning, and the like.

[0087] In some embodiments the sequence homology is against the full length sequence of the polynucleotide encoding a PtIP-83 polypeptide or against the full length sequence of a PtIP-83 polypeptide.

[0088] In some embodiments the nucleic acid encoding a PtIP-83 polypeptide is selected from SEQ ID NO: 2, SEQ ID NO: 4, SEQ ID NO: 6, SEQ ID NO: 8, SEQ ID NO: 10, SEQ ID NO: 12, SEQ ID NO: 14, SEQ ID NO: 16, SEQ ID NO: 18, SEQ ID NO: 20, SEQ ID NO: 22, SEQ ID NO: 24, SEQ ID NO: 28, SEQ ID NO: 29, any one of SEQ ID NO: 172-235, any one of SEQ ID NO: 300-333, any one of SEQ ID NO: 368-397, any one of SEQ ID NO: 428-517, SEQ ID NO: 717, any one of SEQ ID NO: 718-727, and any one of SEQ ID NO: 738-753.

[0089] In some embodiments the nucleic acid encodes a PtIP-83 polypeptide having at least about 50%, 55%, 60%, 65%, 70%, 75%, 80%, 81%, 82%, 83%, 84%, 85%, 86%, 87%, 88%, 89%, 90%, 91%, 92%, 93%, 94%, 95%, 96%, 97%, 98%, 99% or greater sequence identity compared to SEQ ID NO: 1, SEQ ID NO: 3, SEQ ID NO: 5, SEQ ID NO: 7, SEQ ID NO: 9, SEQ ID NO: 11, SEQ ID NO: 13, SEQ ID NO: 15, SEQ ID NO: 17, SEQ ID NO: 19, SEQ ID NO: 21, SEQ ID NO: 23, SEQ ID NO: 716, SEQ ID NO: 754, SEQ ID NO: 755, SEQ ID NO: 756, SEQ ID NO: 757, SEQ ID NO: 758, SEQ ID NO: 759, SEQ ID NO: 760, SEQ ID NO: 761, SEQ ID NO: 762, SEQ ID NO: 763, SEQ ID NO: 764, SEQ ID NO: 765, SEQ ID NO: 766, SEQ ID NO: 767, SEQ ID NO: 768 or SEQ ID NO: 769. In some embodiments the sequence identity is calculated using ClustalW algorithm in the ALIGNX® module of the Vector NTI® Program Suite (Invitrogen Corporation, Carlsbad, Calif.) with all default parameters. In some embodiments the sequence identity is across the entire length of polypeptide calculated using ClustalW algorithm in the ALIGNX module of the Vector NTI Program Suite (Invitrogen Corporation, Carlsbad, Calif.) with all default parameters.

[0090] To determine the percent identity of two amino acid sequences or of two nucleic acid sequences, the sequences are aligned for optimal comparison purposes. The percent identity between the two sequences is a function of the number of identical positions shared by the sequences (i.e., percent identity=number of identical positions/total number of positions (e.g., overlapping positions)×100). In one embodiment, the two sequences are the same length. In another embodiment, the comparison is across the entirety of the reference sequence (e.g., across the entirety of SEQ ID NO: 1). The percent identity between two sequences can be determined using techniques similar to those described below, with or without allowing gaps. In calculating percent identity, typically exact matches are counted.

[0091] The determination of percent identity between two sequences can be accomplished using a mathematical algorithm. A non-limiting example of a mathematical algorithm utilized for the comparison of two sequences is the algorithm of Karlin and Altschul, (1990) Proc. Natl. Acad. Sci. USA 87:2264, modified as in Karlin and Altschul, (1993) Proc. Natl. Acad. Sci. USA 90:5873-5877. Such an algorithm is incorporated into the BLASTN and BLASTX programs of Altschul, et al., (1990) J. Mol. Biol. 215:403. BLAST nucleotide searches can be performed with the BLASTN program, score=100, wordlength=12, to obtain nucleic acid sequences homologous to pesticidal nucleic acid molecules of the embodiments. BLAST protein searches can be performed with the BLASTX program, score=50, wordlength=3, to obtain amino acid sequences homologous to pesticidal protein molecules of the embodiments. To obtain gapped alignments for comparison purposes, Gapped BLAST (in BLAST 2.0) can be utilized as described in Altschul, et al., (1997) Nucleic Acids Res. 25:3389. Alternatively, PSI-Blast can be used to perform an iterated search that detects distant relationships between molecules. See, Altschul, et al., (1997) supra. When utilizing BLAST, Gapped BLAST, and PSI-Blast programs, the default parameters of the respective programs (e.g., BLASTX and BLASTN) can be used. Alignment may also be performed manually by inspection.

[0092] Another non-limiting example of a mathematical algorithm utilized for the comparison of sequences is the ClustalW algorithm (Higgins, et al., (1994) Nucleic Acids Res. 22:4673-4680). ClustalW compares sequences and aligns the entirety of the amino acid or DNA sequence, and thus can provide data about the sequence conservation of the entire amino acid sequence. The ClustalW algorithm is used in several commercially available DNA/amino acid analysis software packages, such as the ALIGNX® module of the Vector NTI® Program Suite (Invitrogen Corporation, Carlsbad, Calif.). After alignment of amino acid sequences with ClustalW, the percent amino acid identity can be assessed. A non-limiting example of a software program useful for analysis of ClustalW alignments is GENEDOC™. GENEDOC™ (Karl Nicholas) allows assessment of amino acid (or DNA) similarity and identity between multiple proteins. Another non-limiting example of a mathematical algorithm utilized for the comparison of sequences is the algorithm of Myers and Miller, (1988) CABIOS 4:11-17. Such an algorithm is incorporated into the ALIGN program (version 2.0), which is part of the GCG Wisconsin Genetics Software Package, Version 10 (available from Accelrys, Inc., 9685 Scranton Rd., San Diego, Calif., USA). When utilizing the ALIGN program for comparing amino acid sequences, a PAM120 weight residue table, a gap length penalty of 12, and a gap penalty of 4 can be used.

[0093] Another non-limiting example of a mathematical algorithm utilized for the comparison of sequences is the algorithm of Needleman and Wunsch, (1970) J. Mol. Biol. 48(3):443-453, used GAP Version 10 software to determine sequence identity or similarity using the following default parameters: % identity and % similarity for a nucleic acid sequence using GAP Weight of 50 and Length Weight of 3, and the nwsgapdna.cmpii scoring matrix; % identity or % similarity for an amino acid sequence using GAP weight of 8 and length weight of 2, and the BLOSUM62 scoring program. Equivalent programs may also be used. “Equivalent program” is used herein to refer to any sequence comparison program that, for any two sequences in question, generates an alignment having identical nucleotide residue matches and an identical percent sequence identity when compared to the corresponding alignment generated by GAP Version 10.

[0094] The embodiments also encompass nucleic acid molecules encoding PtIP-83 polypeptide variants. “Variants” of the PtIP-83 polypeptide encoding nucleic acid sequences include those sequences that encode the PtIP-83 polypeptides disclosed herein but that differ conservatively because of the degeneracy of the genetic code as well as those that are sufficiently identical as discussed above. Naturally occurring allelic variants can be identified with the use of well-known molecular biology techniques, such as polymerase chain reaction (PCR) and hybridization techniques as outlined below. Variant nucleic acid sequences also include synthetically derived nucleic acid sequences that have been generated, for example, by using site-directed mutagenesis but which still encode the PtIP-83 polypeptides disclosed as discussed below.

[0095] The present disclosure provides isolated or recombinant polynucleotides that encode any of the PtIP-83 polypeptides disclosed herein. Those having ordinary skill in the art will readily appreciate that due to the degeneracy of the genetic code, a multitude of nucleotide sequences encoding PtIP-83 polypeptides of the present disclosure exist. Table 1 is a codon table that provides the synonymous codons for each amino acid. For example, the codons AGA, AGG, CGA, CGC, CGG, and CGU all encode the amino acid arginine. Thus, at every position in the nucleic acids of the disclosure where an arginine is specified by a codon, the codon can be altered to any of the corresponding codons described above without altering the encoded polypeptide. It is understood that U in an RNA sequence corresponds to T in a DNA sequence.

TABLE 1

| | | | |
|---|---|---|---|
| Alanine | Ala | A | GCA GCC GCG GC |
| Cystine | Cys | | UGC UGU |
| Aspartic acid | Asp | D | GAC GAU |
| Glutamic acid | Glu | E | GAA GAG |
| Phenylalanine | Phe | F | UUC UUU |
| Glycine | Gly | G | GGA GGC GGG GGU |
| Histidine | His | | CAC CAU |
| Isoleucine | II | I | AUA AUC AUU |
| Lysine | Lys | K | AAA AAG |
| Leucine | Leu | L | UUA UUG CUA CUC CUG C□U |
| Methionine | Me | M | AUG |
| Asparagine | Asn | N | AAC AAU |
| Proline | Pro | P | CCA CCC CCG CCU |
| Glutamine | Gln | Q | CAA CAG |
| Arginine | Arg | R | AGA AGG CGA CGC CGG CGU |
| Serine | Ser | S | AGC AGU UCA UCC UCG UCC |
| Threonine | Thr | T | ACA ACC ACG ACU |
| Valine | Val | V | GUA GUC GUG GUU |
| Tryptophan | Trp | W | TGG |
| Tyrosine | Tyr | Y | UAC UAU |

[0096] The skilled artisan will further appreciate that changes can be introduced by mutation of the nucleic acid sequences thereby leading to changes in the amino acid sequence of the encoded PtIP-83 polypeptides, without altering the biological activity of the proteins. Thus, variant nucleic acid molecules can be created by introducing one or more nucleotide substitutions, additions and/or deletions into the corresponding nucleic acid sequence disclosed herein, such that one or more amino acid substitutions, additions or deletions are introduced into the encoded protein. Mutations can be introduced by standard techniques, such as site-directed mutagenesis and PCR-mediated mutagenesis. Such variant nucleic acid sequences are also encompassed by the present disclosure.

[0097] Alternatively, variant nucleic acid sequences can be made by introducing mutations randomly along all or part of the coding sequence, such as by saturation mutagenesis, and the resultant mutants can be screened for ability to confer pesticidal activity to identify mutants that retain activity. Following mutagenesis, the encoded protein can be expressed recombinantly, and the activity of the protein can be determined using standard assay techniques.

[0098] The polynucleotides of the disclosure and fragments thereof are optionally used as substrates for a variety of recombination and recursive recombination reactions, in addition to standard cloning methods as set forth in, e.g., Ausubel, Berger and Sambrook, i.e., to produce additional pesticidal polypeptide homologues and fragments thereof with desired properties. A variety of such reactions are known, including those developed by the inventors and their co-workers. Methods for producing a variant of any nucleic acid listed herein comprising recursively recombining such polynucleotide with a second (or more) polynucleotide, thus forming a library of variant polynucleotides are also embodiments of the disclosure, as are the libraries produced, the cells comprising the libraries and any recombinant polynucleotide produces by such methods. Additionally, such methods optionally comprise selecting a variant polynucleotide from such libraries based on pesticidal activity, as is wherein such recursive recombination is done in vitro or in vivo.

[0099] A variety of diversity generating protocols, including nucleic acid recursive recombination protocols are available and fully described in the art. The procedures can be used separately, and/or in combination to produce one or more variants of a nucleic acid or set of nucleic acids, as well as variants of encoded proteins. Individually and collectively, these procedures provide robust, widely applicable ways of generating diversified nucleic acids and sets of nucleic acids (including, e.g., nucleic acid libraries) useful, e.g., for the engineering or rapid evolution of nucleic acids, proteins, pathways, cells and/or organisms with new and/or improved characteristics.

[0100] While distinctions and classifications are made in the course of the ensuing discussion for clarity, it will be appreciated that the techniques are often not mutually exclusive. Indeed, the various methods can be used singly or in combination, in parallel or in series, to access diverse sequence variants.

[0101] The result of any of the diversity generating procedures described herein can be the generation of one or more nucleic acids, which can be selected or screened for nucleic acids with or which confer desirable properties or that encode proteins with or which confer desirable properties. Following diversification by one or more of the methods herein or otherwise available to one of skill, any nucleic acids that are produced can be selected for a desired activity or property, e.g. pesticidal activity or, such activity at a desired pH, etc. This can include identifying any activity that can be detected, for example, in an automated or automatable format, by any of the assays in the art, see, e.g., discussion of screening of insecticidal activity, infra. A variety of related (or even unrelated) properties can be evaluated, in serial or in parallel, at the discretion of the practitioner.

[0102] Descriptions of a variety of diversity generating procedures for generating modified nucleic acid sequences, e.g., those coding for polypeptides having pesticidal activity or fragments thereof, are found in the following publications and the references cited therein: Soong, et al., (2000) Nat Genet 25(4):436-439; Stemmer, et al., (1999) Tumor Targeting 4:1-4; Ness, et al., (1999) Nat Biotechnol 17:893-896; Chang, et al., (1999) Nat Biotechnol 17:793-797; Minshull and Stemmer, (1999) Curr Opin Chem Biol 3:284-290; Christians, et al., (1999) Nat Biotechnol 17:259-264; Crameri, et al., (1998) Nature 391:288-291; Crameri, et al., (1997) Nat Biotechnol 15:436-438; Zhang, et al., (1997) PNAS USA 94:4504-4509; Patten, et al., (1997) Curr Opin Biotechnol 8:724-733; Crameri, et al., (1996) Nat Med 2:100-103; Crameri, et al., (1996) Nat Biotechnol 14:315-319; Gates, et al., (1996) J Mol Biol 255:373-386; Stemmer, (1996) “Sexual PCR and Assembly PCR” In: The Encyclopedia of Molecular Biology. VCH Publishers, New York. pp. 447-457; Crameri and Stemmer, (1995) BioTechniques 18:194-195; Stemmer, et al., (1995) Gene, 164:49-53; Stemmer, (1995) Science 270: 1510; Stemmer, (1995) Bio/Technology 13:549-553; Stemmer, (1994) Nature 370:389-391 and Stemmer, (1994) PNAS USA 91:10747-10751.

[0103] Mutational methods of generating diversity include, for example, site-directed mutagenesis (Ling, et al., (1997) Anal Biochem 254(2):157-178; Dale, et al., (1996) Methods Mol Biol 57:369-374; Smith, (1985) Ann Rev Genet 19:423-462; Botstein and Shortle, (1985) Science 229:1193-1201; Carter, (1986) Biochem J 237:1-7 and Kunkel, (1987) “The efficiency of oligonucleotide directed mutagenesis” in Nucleic Acids & Molecular Biology (Eckstein and Lilley, eds., Springer Verlag, Berlin)); mutagenesis using uracil containing templates (Kunkel, (1985) PNAS USA 82:488-492; Kunkel, et al., (1987) Methods Enzymol 154:367-382 and Bass, et al., (1988) Science 242:240-245); oligonucleotide-directed mutagenesis (Zoller and Smith, (1983) Methods Enzymol 100:468-500; Zoller and Smith, (1987) Methods Enzymol 154:329-350 (1987); Zoller and Smith, (1982) Nucleic Acids Res 10:6487-6500), phosphorothioate-modified DNA mutagenesis (Taylor, et al., (1985) Nucl Acids Res 13:8749-8764; Taylor, et al., (1985) Nucl Acids Res 13:8765-8787 (1985); Nakamaye and Eckstein, (1986) Nucl Acids Res 14:9679-9698; Sayers, et al., (1988) Nucl Acids Res 16:791-802 and Sayers, et al., (1988) Nucl Acids Res 16:803-814); mutagenesis using gapped duplex DNA (Kramer, et al., (1984) Nucl Acids Res 12:9441-9456; Kramer and Fritz, (1987) Methods Enzymol 154:350-367; Kramer, et al., (1988) Nucl Acids Res 16:7207 and Fritz, et al., (1988) Nucl Acids Res 16:6987-6999).

[0104] Additional suitable methods include point mismatch repair (Kramer, et al., (1984) Cell 38:879-887), mutagenesis using repair-deficient host strains (Carter, et al., (1985) Nucl Acids Res 13:4431-4443 and Carter, (1987) Methods in Enzymol 154:382-403), deletion mutagenesis (Eghtedarzadeh and Henikoff, (1986) Nucl Acids Res 14:5115), restriction-selection and restriction-purification (Wells, et al., (1986) Phil Trans R Soc Lond A 317:415-423), mutagenesis by total gene synthesis (Nambiar, et al., (1984) Science 223:1299-1301; Sakamar and Khorana, (1988) Nucl Acids Res 14:6361-6372; Wells, et al., (1985) Gene 34:315-323 and Grundström, et al., (1985) Nucl Acids Res 13:3305-3316), double-strand break repair (Mandecki, (1986) PNAS USA, 83:7177-7181 and Arnold, (1993) Curr Opin Biotech 4:450-455). Additional details on many of the above methods can be found in Methods Enzymol Volume 154, which also describes useful controls for trouble-shooting problems with various mutagenesis methods.

[0105] Additional details regarding various diversity generating methods can be found in the following US patents, PCT Publications and applications and EPO publications: U.S. Pat. Nos. 5,723,323, 5,763,192, 5,814,476, 5,817,483, 5,824,514, 5,976,862, 5,605,793, 5,811,238, 5,830,721, 5,834,252, 5,837,458, WO 1995/22625, WO 1996/33207, WO 1997/20078, WO 1997/35966, WO 1999/41402, WO 1999/41383, WO 1999/41369, WO 1999/41368, EP 752008, EP 0932670, WO 1999/23107, WO 1999/21979, WO 1998/31837, WO 1998/27230, WO 1998/27230, WO 2000/00632, WO 2000/09679, WO 1998/42832, WO 1999/29902, WO 1998/41653, WO 1998/41622, WO 1998/42727, WO 2000/18906, WO 2000/04190, WO 2000/42561, WO 2000/42559, WO 2000/42560, WO 2001/23401 and PCT/US01/06775.

[0106] The nucleotide sequences of the embodiments can also be used to isolate corresponding sequences from ferns or other primitive plant, particularly a Asplenium, Polypodium, Adiantum, Platycerium, Nephrolepis, Ophioglossum, Colysis, Bolbitis, Blechnum, Selaginella, Lycopodium, and Huperzia species. In this manner, methods such as PCR, hybridization, and the like can be used to identify such sequences based on their sequence homology to the sequences set forth herein. Sequences that are selected based on their sequence identity to the entire sequences set forth herein or to fragments thereof are encompassed by the embodiments. Such sequences include sequences that are orthologs of the disclosed sequences. The term “orthologs” refers to genes derived from a common ancestral gene and which are found in different species as a result of speciation. Genes found in different species are considered orthologs when their nucleotide sequences and/or their encoded protein sequences share substantial identity as defined elsewhere herein. Functions of orthologs are often highly conserved among species.

[0107] In a PCR approach, oligonucleotide primers can be designed for use in PCR reactions to amplify corresponding DNA sequences from cDNA or genomic DNA extracted from any organism of interest. Methods for designing PCR primers and PCR cloning are generally known in the art and are disclosed in Sambrook, et al., (1989) Molecular Cloning: A Laboratory Manual (2d ed., Cold Spring Harbor Laboratory Press, Plainview, New York), hereinafter “Sambrook”. See also, Innis, et al., eds. (1990) PCR Protocols: A Guide to Methods and Applications (Academic Press, New York); Innis and Gelfand, eds. (1995) PCR Strategies (Academic Press, New York); and Innis and Gelfand, eds. (1999) PCR Methods Manual (Academic Press, New York). Known methods of PCR include, but are not limited to, methods using paired primers, nested primers, single specific primers, degenerate primers, gene-specific primers, vector-specific primers, partially-mismatched primers, and the like. To identify potential PtIP-83 polypeptides from fern or moss collections, the fern or moss cell lysates can be screened with antibodies generated against a PtIP-83 polypeptides and/or PtIP-83 polypeptides using Western blotting and/or ELISA methods. This type of assays can be performed in a high throughput fashion. Positive samples can be further analyzed by various techniques such as antibody based protein purification and identification. Methods of generating antibodies are well known in the art as discussed infra.

[0108] Alternatively, mass spectrometry based protein identification method can be used to identify homologs of PtIP-83 polypeptides using protocols in the literatures (Scott Patterson, (1998), 10.22, 1-24, Current Protocol in Molecular Biology published by John Wiley & Son Inc). Specifically, LC-MS/MS based protein identification method is used to associate the MS data of given cell lysate or desired molecular weight enriched samples (excised from SDS-PAGE gel of relevant molecular weight bands to PtIP-83 polypeptides) with sequence information of PtIP-83 polypeptides SEQ ID NO: 1, SEQ ID NO: 3, SEQ ID NO: 5, SEQ ID NO: 7, SEQ ID NO: 9, SEQ ID NO: 11, SEQ ID NO: 13, SEQ ID NO: 15, SEQ ID NO: 17, SEQ ID NO: 19, SEQ ID NO: 21, SEQ ID NO: 23, SEQ ID NO: 716, SEQ ID NO: 754, SEQ ID NO: 755, SEQ ID NO: 756, SEQ ID NO: 757, SEQ ID NO: 758, SEQ ID NO: 759, SEQ ID NO: 760, SEQ ID NO: 761, SEQ ID NO: 762, SEQ ID NO: 763, SEQ ID NO: 764, SEQ ID NO: 765, SEQ ID NO: 766, SEQ ID NO: 767, SEQ ID NO: 768 or SEQ ID NO: 769 and their homologs. Any match in peptide sequences indicates the potential of having the homologous proteins in the samples. Additional techniques (protein purification and molecular biology) can be used to isolate the protein and identify the sequences of the homologs.

[0109] In hybridization methods, all or part of the pesticidal nucleic acid sequence can be used to screen cDNA or genomic libraries. Methods for construction of such cDNA and genomic libraries are generally known in the art and are disclosed in Sambrook and Russell, (2001), supra. The so-called hybridization probes may be genomic DNA fragments, cDNA fragments, RNA fragments or other oligonucleotides and may be labeled with a detectable group such as 32P or any other detectable marker, such as other radioisotopes, a fluorescent compound, an enzyme or an enzyme co-factor. Probes for hybridization can be made by labeling synthetic oligonucleotides based on the known PtIP-83 polypeptide-encoding nucleic acid sequence disclosed herein. Degenerate primers designed on the basis of conserved nucleotides or amino acid residues in the nucleic acid sequence or encoded amino acid sequence can additionally be used. The probe typically comprises a region of nucleic acid sequence that hybridizes under stringent conditions to at least about 12, at least about 25, at least about 50, 75, 100, 125, 150, 175 or 200 consecutive nucleotides of nucleic acid sequence encoding a PtIP-83 polypeptide of the disclosure or a fragment or variant thereof. Methods for the preparation of probes for hybridization are generally known in the art and are disclosed in Sambrook and Russell, (2001), supra, herein incorporated by reference.

[0110] For example, an entire nucleic acid sequence, encoding a PtIP-83 polypeptide, disclosed herein or one or more portions thereof may be used as a probe capable of specifically hybridizing to corresponding nucleic acid sequences encoding PtIP-83 polypeptide-like sequences and messenger RNAs. To achieve specific hybridization under a variety of conditions, such probes include sequences that are unique and are preferably at least about 10 nucleotides in length or at least about 20 nucleotides in length. Such probes may be used to amplify corresponding pesticidal sequences from a chosen organism by PCR. This technique may be used to isolate additional coding sequences from a desired organism or as a diagnostic assay to determine the presence of coding sequences in an organism. Hybridization techniques include hybridization screening of plated DNA libraries (either plaques or colonies; see, for example, Sambrook, et al., (1989) Molecular Cloning: A Laboratory Manual (2d ed., Cold Spring Harbor Laboratory Press, Cold Spring Harbor, N.Y.). Hybridization of such sequences may be carried out under stringent conditions. “Stringent conditions” or “stringent hybridization conditions” is used herein to refer to conditions under which a probe will hybridize to its target sequence to a detectably greater degree than to other sequences (e.g., at least 2-fold over background). Stringent conditions are sequence-dependent and will be different in different circumstances. By controlling the stringency of the hybridization and/or washing conditions, target sequences that are 100% complementary to the probe can be identified (homologous probing). Alternatively, stringency conditions can be adjusted to allow some mismatching in sequences so that lower degrees of similarity are detected (heterologous probing). Generally, a probe is less than about 1000 nucleotides in length, preferably less than 500 nucleotides in length.

[0111] Typically, stringent conditions will be those in which the salt concentration is less than about 1.5 M Na ion, typically about 0.01 to 1.0 M Na ion concentration (or other salts) at pH 7.0 to 8.3 and the temperature is at least about 30° C. for short probes (e.g., 10 to 50 nucleotides) and at least about 60° C. for long probes (e.g., greater than 50 nucleotides). Stringent conditions may also be achieved with the addition of destabilizing agents such as formamide. Exemplary low stringency conditions include hybridization with a buffer solution of 30 to 35% formamide, 1 M NaCl, 1% SDS (sodium dodecyl sulphate) at 37° C., and a wash in 1× to 2×SSC (20×SSC=3.0 M NaCl/0.3 M trisodium citrate) at 50 to 55° C. Exemplary moderate stringency conditions include hybridization in 40 to 45% formamide, 1.0 M NaCl, 1% SDS at 37° C., and a wash in 0.5× to 1×SSC at 55 to 60° C. Exemplary high stringency conditions include hybridization in 50% formamide, 1 M NaCl, 1% SDS at 37° C., and a wash in 0.1×SSC at 60 to 65° C. Optionally, wash buffers may comprise about 0.1% to about 1% SDS. Duration of hybridization is generally less than about 24 hours, usually about 4 to about 12 hours.

[0112] Specificity is typically the function of post-hybridization washes, the critical factors being the ionic strength and temperature of the final wash solution. For DNA-DNA hybrids, the Tm can be approximated from the equation of Meinkoth and Wahl, (1984) Anal. Biochem. 138:267-284: Tm=81.5° C.+16.6 (log M)+0.41 (% GC)−0.61 (% form)−500/L; where M is the molarity of monovalent cations, % GC is the percentage of guanosine and cytosine nucleotides in the DNA, % form is the percentage of formamide in the hybridization solution, and L is the length of the hybrid in base pairs. The Tm is the temperature (under defined ionic strength and pH) at which 50% of a complementary target sequence hybridizes to a perfectly matched probe. Tm is reduced by about 1° C. for each 1% of mismatching; thus, Tm, hybridization, and/or wash conditions can be adjusted to hybridize to sequences of the desired identity. For example, if sequences with ≥90% identity are sought, the Tm can be decreased 10° C. Generally, stringent conditions are selected to be about 5° C. lower than the thermal melting point (Tm) for the specific sequence and its complement at a defined ionic strength and pH. However, severely stringent conditions can utilize a hybridization and/or wash at 1, 2, 3 or 4° C. lower than the thermal melting point (Tm); moderately stringent conditions can utilize a hybridization and/or wash at 6, 7, 8, 9 or 10° C. lower than the thermal melting point (Tm); low stringency conditions can utilize a hybridization and/or wash at 11, 12, 13, 14, 15 or 20° C. lower than the thermal melting point (Tm). Using the equation, hybridization and wash compositions, and desired Tm, those of ordinary skill will understand that variations in the stringency of hybridization and/or wash solutions are inherently described. If the desired degree of mismatching results in a Tm of less than 45° C. (aqueous solution) or 32° C. (formamide solution), it is preferred to increase the SSC concentration so that a higher temperature can be used. An extensive guide to the hybridization of nucleic acids is found in Tijssen, (1993) Laboratory Techniques in Biochemistry and Molecular Biology-Hybridization with Nucleic Acid Probes, Part I, Chapter 2 (Elsevier, N.Y.); and Ausubel, et al., eds. (1995) Current Protocols in Molecular Biology, Chapter 2 (Greene Publishing and Wiley-Interscience, New York). See, Sambrook, et al., (1989) Molecular Cloning: A Laboratory Manual (2d ed., Cold Spring Harbor Laboratory Press, Cold Spring Harbor, N.Y.).

[0113] In some embodiments polynucleotides are provided encoding a PtIP-83 polypeptide comprising an amino acid sequence having at least 80%, at least 85%, at least 90%, at least 95%, at least 96%, at least 97%, at least 98% or at least 99% sequence identity to any one of SEQ ID NO: 786-888.

[0114] In some embodiments polynucleotides are provided encoding a PtIP-83 polypeptide comprising the amino acid sequence of any one of SEQ ID NO: 786-888.

[0115] In some embodiments the polynucleotide encoding the PtIP-83 polypeptide comprising the amino acid sequence of any one of SEQ ID NO: 786-888 is a non-genomic sequence.

[0116] In some embodiments the polynucleotide encoding the PtIP-83 polypeptide comprising the amino acid sequence of any one of SEQ ID NO: 786-888 is a cDNA.

### Proteins and Variants and Fragments Thereof

[0117] PtIP-83 polypeptides are also encompassed by the disclosure. “Pteridophyta Insecticidal Protein-83” “PtIP-83 polypeptide”, and “PtIP-83 protein” as used herein interchangeably refers to a polypeptide having insecticidal activity including but not limited to insecticidal activity against one or more insect pests of the Lepidoptera and/or Coleoptera orders, and is sufficiently homologous to the protein of SEQ ID NO: 1. A variety of PtIP-83 polypeptides are contemplated. Sources of PtIP-83 polypeptides or related proteins are fern species selected from but not limited to Polypodium punctatum, Lygodium flexuosum, Microsorum musifolium, Adiantum peruvianum, Adiantum trapeziforme and Adiantum pedatum.

[0118] “Sufficiently homologous” is used herein to refer to an amino acid sequence that has at least about 40%, 45%, 50%, 51%, 52%, 53%, 54%, 55%, 56%, 57%, 58%, 59%, 60%, 61%, 62%, 63%, 64%, 65%, 66%, 67%, 68%, 69%, 70%, 71%, 72%, 73%, 74%, 75%, 76%, 77%, 78%, 79%, 80%, 81%, 82%, 83%, 84%, 85%, 86%, 87%, 88%, 89%, 90%, 91%, 92%, 93%, 94%, 95%, 96%, 97%, 98%, 99% or greater sequence homology compared to a reference sequence using one of the alignment programs described herein using standard parameters. In some embodiments the sequence homology is against the full length sequence of a PtIP-83 polypeptide. In some embodiments the PtIP-83 polypeptide has at least about 40%, 45%, 50%, 51%, 52%, 53%, 54%, 55%, 56%, 57%, 58%, 59%, 60%, 61%, 62%, 63%, 64%, 65%, 66%, 67%, 68%, 69%, 70%, 71%, 72%, 73%, 74%, 75%, 76%, 77%, 78%, 79%, 80%, 81%, 82%, 83%, 84%, 85%, 86%, 87%, 88%, 89%, 90%, 91%, 92%, 93%, 94%, 95%, 96%, 97%, 98%, 99% or greater sequence identity compared to SEQ ID NO: 1. One of skill in the art will recognize that these values can be appropriately adjusted to determine corresponding homology of proteins taking into account amino acid similarity and the like.

[0119] As used herein, the terms “protein,” “peptide molecule,” or “polypeptide” includes any molecule that comprises five or more amino acids. It is well known in the art that protein, peptide or polypeptide molecules may undergo modification, including post-translational modifications, such as, but not limited to, disulfide bond formation, glycosylation, phosphorylation or oligomerization. Thus, as used herein, the terms “protein,” “peptide molecule” or “polypeptide” includes any protein that is modified by any biological or non-biological process. The terms “amino acid” and “amino acids” refer to all naturally occurring L-amino acids.

[0120] A “recombinant protein” or “recombinant polypeptide” is used herein to refer to a protein that is no longer in its natural environment, for example in vitro or in a recombinant bacterial or plant host cell. A “purified protein” or “purified polypeptide” is used herein to refer to a protein that is substantially free of cellular material. A PtIP-83 polypeptide that is substantially free of cellular material includes preparations of protein having less than about 30%, 20%, 10% or 5% (by dry weight) of non-pesticidal protein (also referred to herein as a “contaminating protein”).

[0121] “Fragments” or “biologically active portions” include polypeptide fragments comprising amino acid sequences sufficiently identical to a PtIP-83 polypeptide and that exhibit insecticidal activity. “Fragments” or “biologically active portions” of PtIP-83 polypeptides includes fragments comprising amino acid sequences sufficiently identical to the amino acid sequence set forth in SEQ ID NO: 1, SEQ ID NO: 3, SEQ ID NO: 5, SEQ ID NO: 7, SEQ ID NO: 9, SEQ ID NO: 11, SEQ ID NO: 13, SEQ ID NO: 15, SEQ ID NO: 17, SEQ ID NO: 19, SEQ ID NO: 21, SEQ ID NO: 23, SEQ ID NO: 716, SEQ ID NO: 754, SEQ ID NO: 755, SEQ ID NO: 756, SEQ ID NO: 757, SEQ ID NO: 758, SEQ ID NO: 759, SEQ ID NO: 760, SEQ ID NO: 761, SEQ ID NO: 762, SEQ ID NO: 763, SEQ ID NO: 764, SEQ ID NO: 765, SEQ ID NO: 766, SEQ ID NO: 767, SEQ ID NO: 768, SEQ ID NO: 769, or SEQ ID NOs: 958-1026, wherein the PtIP-83 polypeptide has insecticidal activity. Such biologically active portions can be prepared by recombinant techniques and evaluated for insecticidal activity. In some embodiments, the PtIP-83 polypeptide fragment is an N-terminal and/or a C-terminal truncation of at least about 1, 2, 3, 4, 5, 6, 7, 8, 9, 10, 11, 12, 13, 14, 15, 16, 17, 18, 19, 20, 25, 26, 27, 28, 29, 30, 31, 32, 33, 34 or more amino acids from the N-terminus and/or C-terminus relative to SEQ ID NO: 1, SEQ ID NO: 3, SEQ ID NO: 5, SEQ ID NO: 7, SEQ ID NO: 9, SEQ ID NO: 11, SEQ ID NO: 13, SEQ ID NO: 15, SEQ ID NO: 17, SEQ ID NO: 19, SEQ ID NO: 21, SEQ ID NO: 23, SEQ ID NO: 716, SEQ ID NO: 754, SEQ ID NO: 755, SEQ ID NO: 756, SEQ ID NO: 757, SEQ ID NO: 758, SEQ ID NO: 759, SEQ ID NO: 760, SEQ ID NO: 761, SEQ ID NO: 762, SEQ ID NO: 763, SEQ ID NO: 764, SEQ ID NO: 765, SEQ ID NO: 766, SEQ ID NO: 767, SEQ ID NO: 768 or SEQ ID NO: 769, e.g., by proteolysis, by insertion of a start codon, by deletion of the codons encoding the deleted amino acids and concomitant insertion of a start codon, and/or insertion of a stop codon.

[0122] In some embodiments, the PtIP-83 polypeptide fragments encompassed herein result from the removal of the N-terminal 1, 2, 3, 4, 5, 6, 7, 8, 9 or 10 or more amino acids relative to SEQ ID NO: 1, SEQ ID NO: 3, SEQ ID NO: 5, SEQ ID NO: 7, SEQ ID NO: 9, SEQ ID NO: 11, SEQ ID NO: 13, SEQ ID NO: 15, SEQ ID NO: 17, SEQ ID NO: 19, SEQ ID NO: 21, SEQ ID NO: 23, SEQ ID NO: 716, SEQ ID NO: 754, SEQ ID NO: 755, SEQ ID NO: 756, SEQ ID NO: 757, SEQ ID NO: 758, SEQ ID NO: 759, SEQ ID NO: 760, SEQ ID NO: 761, SEQ ID NO: 762, SEQ ID NO: 763, SEQ ID NO: 764, SEQ ID NO: 765, SEQ ID NO: 766, SEQ ID NO: 767, SEQ ID NO: 768, SEQ ID NO: 769, SEQ ID NOs: 958-1026, or variants thereof, e.g., by proteolysis or by insertion of a start codon, by deletion of the codons encoding the deleted amino acids and concomitant insertion of a start codon.

[0123] “Variants” as used herein refers to proteins or polypeptides having an amino acid sequence that is at least about 50%, 55%, 60%, 65%, 70%, 75%, 80%, 81%, 82%, 83%, 84%, 85%, 86%, 87%, 88%, 89%, 90%, 91%, 92%, 93%, 94%, 95%, 96%, 97%, 98% or 99% identical to the parental amino acid sequence.

[0124] In some embodiments a PtIP-83 polypeptide comprises an amino acid sequence having at least 40%, 45%, 50%, 51%, 52%, 53%, 54%, 55%, 56%, 57%, 58%, 59%, 60%, 61%, 62%, 63%, 64%, 65%, 66%, 67%, 68%, 69%, 70%, 71%, 72%, 73%, 74%, 75%, 76%, 77%, 78%, 79%, 80%, 81%, 82%, 83%, 84%, 85%, 86%, 87%, 88%, 89%, 90%, 91%, 92%, 93%, 94%, 95%, 96%, 97%, 98% or 99% identity to the amino acid sequence of SEQ ID NO: 1, SEQ ID NO: 3, SEQ ID NO: 5, SEQ ID NO: 7, SEQ ID NO: 9, SEQ ID NO: 11, SEQ ID NO: 13, SEQ ID NO: 15, SEQ ID NO: 17, SEQ ID NO: 19, SEQ ID NO: 21, SEQ ID NO: 23, SEQ ID NO: 716, SEQ ID NO: 754, SEQ ID NO: 755, SEQ ID NO: 756, SEQ ID NO: 757, SEQ ID NO: 758, SEQ ID NO: 759, SEQ ID NO: 760, SEQ ID NO: 761, SEQ ID NO: 762, SEQ ID NO: 763, SEQ ID NO: 764, SEQ ID NO: 765, SEQ ID NO: 766, SEQ ID NO: 767, SEQ ID NO: 768, SEQ ID NO: 769, or SEQ ID NOs: 958-1026, wherein the PtIP-83 polypeptide has insecticidal activity.

[0125] In some embodiments a PtIP-83 polypeptide comprises an amino acid sequence having at least about 80%, 81%, 82%, 83%, 84%, 85%, 86%, 87%, 88%, 89%, 90%, 91%, 92%, 93%, 94%, 95%, 96%, 97%, 98% or 99% identity across the entire length of the amino acid sequence of SEQ ID NO: 1, SEQ ID NO: 3, SEQ ID NO: 5, SEQ ID NO: 7, SEQ ID NO: 9, SEQ ID NO: 11, SEQ ID NO: 13, SEQ ID NO: 15, SEQ ID NO: 17, SEQ ID NO: 19, SEQ ID NO: 21, SEQ ID NO: 23, SEQ ID NO: 716, SEQ ID NO: 754, SEQ ID NO: 755, SEQ ID NO: 756, SEQ ID NO: 757, SEQ ID NO: 758, SEQ ID NO: 759, SEQ ID NO: 760, SEQ ID NO: 761, SEQ ID NO: 762, SEQ ID NO: 763, SEQ ID NO: 764, SEQ ID NO: 765, SEQ ID NO: 766, SEQ ID NO: 767, SEQ ID NO: 768, SEQ ID NO: 769 or SEQ ID NOs: 958-1026.

[0126] In some embodiments a PtIP-83 polypeptide comprises an amino acid sequence having at least about 80%, 81%, 82%, 83%, 84%, 85%, 86%, 87%, 88%, 89%, 90%, 91%, 92%, 93%, 94%, 95%, 96%, 97%, 98% or 99% identity across the entire length of the amino acid sequence of SEQ ID NO: 1, SEQ ID NO: 3, SEQ ID NO: 5, SEQ ID NO: 7, SEQ ID NO: 9, SEQ ID NO: 11, SEQ ID NO: 13, SEQ ID NO: 15, SEQ ID NO: 17, SEQ ID NO: 19, SEQ ID NO: 21, SEQ ID NO: 23, SEQ ID NO: 716, SEQ ID NO: 754, SEQ ID NO: 755, SEQ ID NO: 756, SEQ ID NO: 757, SEQ ID NO: 758, SEQ ID NO: 759, SEQ ID NO: 760, SEQ ID NO: 761, SEQ ID NO: 762, SEQ ID NO: 763, SEQ ID NO: 764, SEQ ID NO: 765, SEQ ID NO: 766, SEQ ID NO: 767, SEQ ID NO: 768, SEQ ID NO: 769, or SEQ ID NOs: 958-1026, and has at least one amino acid substitution, deletion, insertion, and/or addition at the N-terminus or C-terminus compared to the native sequence of SEQ ID NO: 1, SEQ ID NO: 3, SEQ ID NO: 5, SEQ ID NO: 7, SEQ ID NO: 9, SEQ ID NO: 11, SEQ ID NO: 13, SEQ ID NO: 15, SEQ ID NO: 17, SEQ ID NO: 19, SEQ ID NO: 21, SEQ ID NO: 23, SEQ ID NO: 716, SEQ ID NO: 754, SEQ ID NO: 755, SEQ ID NO: 756, SEQ ID NO: 757, SEQ ID NO: 758, SEQ ID NO: 759, SEQ ID NO: 760, SEQ ID NO: 761, SEQ ID NO: 762, SEQ ID NO: 763, SEQ ID NO: 764, SEQ ID NO: 765, SEQ ID NO: 766, SEQ ID NO: 767, SEQ ID NO: 768, SEQ ID NO: 769 or SEQ ID NOs: 958-1026.

[0127] In some embodiments a PtIP-83 polypeptide comprises an amino acid sequence of SEQ ID NO: 1, SEQ ID NO: 3, SEQ ID NO: 5, SEQ ID NO: 7, SEQ ID NO: 9, SEQ ID NO: 11, SEQ ID NO: 13, SEQ ID NO: 15, SEQ ID NO: 17, SEQ ID NO: 19, SEQ ID NO: 21, SEQ ID NO: 23, SEQ ID NO: 716, SEQ ID NO: 754, SEQ ID NO: 755, SEQ ID NO: 756, SEQ ID NO: 757, SEQ ID NO: 758, SEQ ID NO: 759, SEQ ID NO: 760, SEQ ID NO: 761, SEQ ID NO: 762, SEQ ID NO: 763, SEQ ID NO: 764, SEQ ID NO: 765, SEQ ID NO: 766, SEQ ID NO: 767, SEQ ID NO: 768, SEQ ID NO: 769, or SEQ ID NOs: 958-1026, having 1, 2, 3, 4, 5, 6, 7, 8, 9, 10 11, 12, 13, 14, 15, 16, 17, 18, 19, 20, 21, 22, 23, 24, 25, 26, 27, 28, 29, 30, 31, 32, 33, 34, 35, 36, 37, 38, 39, 40, 41, 42, 43, 44, 45, 46, 47, 48, 49, 50, 51, 52, 53, 54, 55, 56, 57, 58, 59, 60, 61, 62, 63, 64, 65, 66, 67, 68, 69, 70 or more amino acid substitutions compared to the native amino acid at the corresponding position of SEQ ID NO: 1, SEQ ID NO: 3, SEQ ID NO: 5, SEQ ID NO: 7, SEQ ID NO: 9, SEQ ID NO: 11, SEQ ID NO: 13, SEQ ID NO: 15, SEQ ID NO: 17, SEQ ID NO: 19, SEQ ID NO: 21, SEQ ID NO: 23, SEQ ID NO: 716, SEQ ID NO: 754, SEQ ID NO: 755, SEQ ID NO: 756, SEQ ID NO: 757, SEQ ID NO: 758, SEQ ID NO: 759, SEQ ID NO: 760, SEQ ID NO: 761, SEQ ID NO: 762, SEQ ID NO: 763, SEQ ID NO: 764, SEQ ID NO: 765, SEQ ID NO: 766, SEQ ID NO: 767, SEQ ID NO: 768, SEQ ID NO: 769, or SEQ ID NOs: 958-1026.

[0128] In some embodiments a PtIP-83 polypeptide comprises an amino acid sequence having 1, 2, 3, 4, 5, 6, 7, 8, 9, 1011, 12, 13, 14, 15, 16, 17, 18, 19, 20, 21, 22, 23, 24, 25, 26, 27, 28, 29, 30, 31, 32, 33, 34, 35, 36, 37, 38, 39, 40, 41, 42, 43, 44, 45, 46, 47, 48, 49, 50, 51, 52, 53, 54, 55, 56, 57, 58, 59 or 60 amino acid substitutions, in any combination, compared to the native amino acid at the corresponding position of SEQ ID NO: 1, SEQ ID NO: 3, SEQ ID NO: 5, SEQ ID NO: 7, SEQ ID NO: 9, SEQ ID NO: 11, SEQ ID NO: 13, SEQ ID NO: 15, SEQ ID NO: 17, SEQ ID NO: 19, SEQ ID NO: 21, SEQ ID NO: 23, SEQ ID NO: 716, SEQ ID NO: 754, SEQ ID NO: 755, SEQ ID NO: 756, SEQ ID NO: 757, SEQ ID NO: 758, SEQ ID NO: 759, SEQ ID NO: 760, SEQ ID NO: 761, SEQ ID NO: 762, SEQ ID NO: 763, SEQ ID NO: 764, SEQ ID NO: 765, SEQ ID NO: 766, SEQ ID NO: 767, SEQ ID NO: 768, SEQ ID NO: 769, or SEQ ID NOs: 958-1026.

[0129] In some embodiments a PtIP-83 polypeptide comprises an amino acid sequence having 1, 2, 3, 4, 5, 6, 7, 8, 9, 1011, 12, 13, 14, 15, 16, 17, 18, 19, 20, 21, 22, 23, 24, 25, 26, 27, 28 or 29 amino acid substitutions, in any combination, compared to the native amino acid at the corresponding position of SEQ ID NO: 1, SEQ ID NO: 3, SEQ ID NO: 5, SEQ ID NO: 7, SEQ ID NO: 9, SEQ ID NO: 11, SEQ ID NO: 13, SEQ ID NO: 15, SEQ ID NO: 17, SEQ ID NO: 19, SEQ ID NO: 21, SEQ ID NO: 23, SEQ ID NO: 716, SEQ ID NO: 754, SEQ ID NO: 755, SEQ ID NO: 756, SEQ ID NO: 757, SEQ ID NO: 758, SEQ ID NO: 759, SEQ ID NO: 760, SEQ ID NO: 761, SEQ ID NO: 762, SEQ ID NO: 763, SEQ ID NO: 764, SEQ ID NO: 765, SEQ ID NO: 766, SEQ ID NO: 767, SEQ ID NO: 768, SEQ ID NO: 769, or SEQ ID NOs: 958-1026.

[0130] In some embodiments the PtIP-83 polypeptide comprises an amino acid sequence of SEQ ID NO: 1, SEQ ID NO: 3, SEQ ID NO: 5, SEQ ID NO: 7, SEQ ID NO: 9, SEQ ID NO: 11, SEQ ID NO: 13, SEQ ID NO: 15, SEQ ID NO: 17, SEQ ID NO: 19, SEQ ID NO: 21, SEQ ID NO: 23, SEQ ID NO: 716, SEQ ID NO: 754, SEQ ID NO: 755, SEQ ID NO: 756, SEQ ID NO: 757, SEQ ID NO: 758, SEQ ID NO: 759, SEQ ID NO: 760, SEQ ID NO: 761, SEQ ID NO: 762, SEQ ID NO: 763, SEQ ID NO: 764, SEQ ID NO: 765, SEQ ID NO: 766, SEQ ID NO: 767, SEQ ID NO: 768, SEQ ID NO: 769, or SEQ ID NOs: 958-1026.

[0131] In some embodiments the PtIP-83 polypeptide comprises a non-naturally occurring amino acid sequence. As used herein the term “non-naturally occurring amino acid sequence” means an amino acid sequence not found in nature.

[0132] In some embodiments the PtIP-83 polypeptide is not the polypeptide of SEQ ID NO: 1, SEQ ID NO: 3, SEQ ID NO: 5, SEQ ID NO: 7, SEQ ID NO: 9, SEQ ID NO: 11, SEQ ID NO: 13, SEQ ID NO: 15, SEQ ID NO: 17, SEQ ID NO: 19, SEQ ID NO: 21, SEQ ID NO: 23, SEQ ID NO: 716, SEQ ID NO: 754, SEQ ID NO: 755, SEQ ID NO: 756, SEQ ID NO: 757, SEQ ID NO: 758, SEQ ID NO: 759, SEQ ID NO: 760, SEQ ID NO: 761, SEQ ID NO: 762, SEQ ID NO: 763, SEQ ID NO: 764, SEQ ID NO: 765, SEQ ID NO: 766, SEQ ID NO: 767, SEQ ID NO: 768, SEQ ID NO: 769, or SEQ ID NOs: 958-1026.

[0133] In some embodiments the PtIP-83 polypeptide is a variant of the polypeptide of SEQ ID NO: 1, SEQ ID NO: 3, SEQ ID NO: 5, SEQ ID NO: 7, SEQ ID NO: 9, SEQ ID NO: 11, SEQ ID NO: 13, SEQ ID NO: 15, SEQ ID NO: 17, SEQ ID NO: 19, SEQ ID NO: 21, SEQ ID NO: 23, SEQ ID NO: 716, SEQ ID NO: 754, SEQ ID NO: 755, SEQ ID NO: 756, SEQ ID NO: 757, SEQ ID NO: 758, SEQ ID NO: 759, SEQ ID NO: 760, SEQ ID NO: 761, SEQ ID NO: 762, SEQ ID NO: 763, SEQ ID NO: 764, SEQ ID NO: 765, SEQ ID NO: 766, SEQ ID NO: 767, SEQ ID NO: 768, SEQ ID NO: 769, or SEQ ID NOs: 958-1026, wherein the PtIP-83 polypeptide variant has at least one amino acid substitution, deletion, insertion, and/or addition at the N-terminus or C-terminus compared to SEQ ID NO: 1, SEQ ID NO: 3, SEQ ID NO: 5, SEQ ID NO: 7, SEQ ID NO: 9, SEQ ID NO: 11, SEQ ID NO: 13, SEQ ID NO: 15, SEQ ID NO: 17, SEQ ID NO: 19, SEQ ID NO: 21, SEQ ID NO: 23, SEQ ID NO: 716, SEQ ID NO: 754, SEQ ID NO: 755, SEQ ID NO: 756, SEQ ID NO: 757, SEQ ID NO: 758, SEQ ID NO: 759, SEQ ID NO: 760, SEQ ID NO: 761, SEQ ID NO: 762, SEQ ID NO: 763, SEQ ID NO: 764, SEQ ID NO: 765, SEQ ID NO: 766, SEQ ID NO: 767, SEQ ID NO: 768, SEQ ID NO: 769, or SEQ ID NOs: 958-1026.

[0134] In some embodiments PtIP-83 polypeptide comprising an amino acid sequence of any one of SEQ ID NO: 236-299, SEQ ID NO: 334-367, SEQ ID NO: 398-427, SEQ ID NO: 518-607, SEQ ID NO: 640-645, and SEQ ID NO: 728-737.

[0135] In some embodiments the PtIP-83 polypeptide is a variant of SEQ ID NO: 1, wherein the amino acid at position 53 is Val, Ala, Cys or Thr; the amino acid at position 54 is Lys, Ala, Cys, Asp, Glu, Gly, His, lie, Leu, Met, Asn, Gln, Arg, Ser or Thr; the amino acid at position 55 is Arg, Ala, Asp, Glu, Phe, Gly, His, Lys, Leu, Met, Asn, Gln, Ser, Thr, Val, Trp or Tyr; the amino acid at position 56 is Leu, Glu, Phe, lie, Met, Thr or Val; the amino acid at position 57 is Tyr, Cys, lie, Leu, Met, Thr or Val; the amino acid at position 58 is Val, Cys, Ile or Leu; the amino acid at position 59 is Phe, Leu, Met, Val or Tyr; the amino acid at position 60 is Ala, Cys, Gly, Ser, Thr or Val; the amino acid at position 61 is Asp, Glu, His or Ser; the amino acid at position 62 is Val, Ala, Cys, lie, Leu or Thr; the amino acid at position 63 is Val, Ala, Cys, lie, Leu, Met or Thr; the amino acid at position 64 is Glu, Ala, Cys, Phe, Gly, His, lie, Leu, Met, Asn, Gln, Arg, Ser, Thr, Val, Trp or Tyr; the amino acid at position 65 is Leu, Ala, Cys, Phe, His, lie, Met, Asn, Gln, Thr, Val or Trp; the amino acid at position 66 is Pro, Asp, Gly, Met, Gln or Arg; the amino acid at position 363 is Gln, Ala, Cys, Glu, Phe, Gly, His, Lys, Leu, Asn, Arg, Ser, Thr, Val or Trp; the amino acid at position 364 is lie, Ala, Cys, Glu, Phe, His, Lys, Leu, Met, Asn, Gln, Ser, Thr, Val, Trp or Tyr; the amino acid at position 365 is Leu, Ala, Glu, Phe, Gly, His, lie, Lys, Met, Asn, Arg, Val, Trp or Tyr; the amino acid at position 366 is Gly, Ala, Cys, Phe, His, lie, Lys, Leu, Met, Asn, Ser, Thr or Val; the amino acid at position 367 is Ser, Ala, Cys, Asp, Glu, Phe, Gly, His, lie, Leu, Met, Asn, Pro, Gln, Arg, Thr, Val or Trp; the amino acid at position 368 is Tyr, Ala, Cys, Asp, Glu, Phe, Gly, His, lie, Lys, Leu, Met, Asn, Pro, Gln, Arg, Ser, Thr, Val or Trp; the amino acid at position 369 is Leu, Ala, Cys, Asp, Phe, Gly, lie, Met, Thr or Val; the amino acid at position 370 is Leu, Ala, Cys, Asp, Glu, Phe, Gly, His, lie, Lys, Met, Gln, Arg, Ser, Thr, Val, Trp or Tyr; the amino acid at position 371 is Gln, Ala, Cys, Asp, Glu, Phe, Gly, lie, Lys, Leu, Asn, Arg, Ser, Thr, Val or Trp; the amino acid at position 372 is Gln, Ala, Cys, Asp, Phe, Gly, His, lie, Leu, Asn, Arg, Ser, Val or Tyr; the amino acid at position 373 is Asn, Ala, Cys, Asp, Phe, Gly, His, lie, Lys, Gln, Ser, Thr, Val or Trp; the amino acid at position 556 is Trp, Phe, Thr or Tyr; the amino acid at position 557 is Arg, Cys, Asp, Gly, His, lie, Lys, Leu, Met, Asn, Pro, Gln, Ser, Thr, Val, Trp or Tyr; the amino acid at position 558 is Ala, Cys, Asp, Phe, Gly, His, lie, Lys, Leu, Asn, Pro, Gln, Arg, Ser, Val, Trp or Tyr; the amino acid at position 559 is Lys, Ala, Cys, Phe, Gly, His, lie, Leu, Asn, Gln, Arg, Ser, Thr, Val or Tyr; the amino acid at position 560 is Cys, Ala, Phe, Gly, lie, Met, Asn, Arg, Ser, Thr or Val; the amino acid at position 561 is Lys, Ala, Cys, Asp, Glu, Phe, Gly, His, lie, Leu, Met, Asn, Arg, Ser, Thr, Val or Tyr; the amino acid at position 562 is Asn, Cys, Asp, Glu, Gly, His, Leu, Met, Arg, Ser, Thr, Val or Tyr; the amino acid at position 563 is Val, Ala, Cys, Asp, Phe, His, lie, Leu, Met, Asn, Gln, Thr or Trp; the amino acid at position 564 is Ala, Cys, Gly, Met, Gln, Ser, Thr, Val, Trp or Tyr; the amino acid at position 646 is Leu, Ala, Cys, Gly, lie, Met, Asn, Gln, Ser, Thr or Val; the amino acid at position 647 is Leu, Asp, Gly, Met, Asn, Gln or Thr; the amino acid at position 648 is Met, Ala, Cys, Asp, Glu, Phe, Gly, His, Lys, Leu, Asn, Pro, Gln, Arg, Ser, Thr, Val, Trp or Tyr; the amino acid at position 649 is Pro, Ala, Cys, Asp, Glu, Phe, Gly, His, Lys, Met, Asn, Gln, Arg, Ser, Thr, Trp or Tyr; the amino acid at position 650 is Thr, Ala, Cys, Asp, Phe, Gly, His, lie, Lys, Leu, Met, Pro, Gln, Arg, Ser, Val or Tyr; the amino acid at position 651 is Glu, Ala, Cys, Asp, Gly, His, lie, Leu, Met, Asn, Pro, Gln, Arg, Ser, Thr, Val or Tyr; the amino acid at position 652 is Leu, Cys, Phe, lie, Lys, Met, Pro, Arg, Ser, Thr or Val; the amino acid at position 653 is Thr, Cys, Asp, Glu, Phe, Gly, His, lie, Lys, Leu, Pro, Arg, Ser, Val or Trp; the amino acid at position 654 is Thr, Ala, Cys, Phe, lie, Lys, Leu, Met, Pro, Arg, Ser, Val, Trp or Tyr; the amino acid at position 655 is Trp, Phe or Tyr; the amino acid at position 771 is Arg, Ala, Asp, Glu, Phe, Gly, His, lie, Lys, Leu, Asn, Ser, Thr, Val, Trp or Tyr; the amino acid at position 772 is Arg, Ala, Cys, Asp, Glu, Phe, Gly, His, lie, Lys, Leu, Met, Pro, Gln, Ser, Thr, Val, Trp or Tyr; the amino acid at position 773 is Asp, Ala, Glu, Phe, Gly, His, lie, Lys, Leu, Met, Asn, Gln, Arg, Ser, Thr, Val, Trp or Tyr; the amino acid at position 774 is Gln, Ala, Asp, Gly, His, lie, Lys, Leu, Met, Asn, Pro, Arg, Ser, Thr, Val, Trp or Tyr; the amino acid at position 775 is Val, Ala, Cys, Asp, Glu, Gly, His, lie, Asn, Pro, Gln, Arg, Ser, Thr or Tyr; the amino acid at position 776 is Leu, Ala, Cys, Asp, Glu, Phe, Gly, His, lie, Lys, Asn, Pro, Gln, Arg, Ser, Thr, Val or Tyr; the amino acid at position 777 is Pro, Ala, Cys, Asp, Glu, Phe, Gly, His, Lys, Leu, Met, Asn, Gln, Ser, Thr, Val, Trp or Tyr; the amino acid at position 778 is Phe, Ala, His, lie, Leu, Met, Asn, Gln, Ser, Val, Trp or Tyr; the amino acid at position 779 is Gln, Ala, Cys, Asp, Glu, Gly, His, Lys, Leu, Asn, Pro, Arg, Ser, Thr or Val; the amino acid at position 780 is Ala, Cys, Asn, Pro, Gln or Ser; the amino acid at position 781 is Ala, Cys, Asp, Glu, Phe, Gly, His, lie, Asn, Gln, Arg, Ser, Thr, Val, Trp or Tyr; the amino acid at position 782 is Ala, Cys, Asp, Glu, Phe, Gly, His, lie, Lys, Met, Pro, Gln, Arg, Ser, Thr, Val, Trp or Tyr; the amino acid at position 783 is Pro, Ala, Cys, Asp, Glu, Gly, His, Asn, Gln, Arg, Ser, Thr or Val; the amino acid at position 784 is Leu, Ala, Glu, Phe, His, lie, Lys, Met, Asn, Pro, Gln, Ser, Thr, Val or Trp; the amino acid at position 785 is Asn, Ala, Cys, Glu, Phe, Gly, His, lie, Lys, Leu, Met, Gln, Arg, Ser, Thr, Val, Trp or Tyr; and the amino acid at position 786 is Tyr, Phe, lie, Leu or Trp.

[0136] In some embodiments the PtIP-83 polypeptide is a variant of SEQ ID NO: 1, wherein the amino acid at position 1 is Met or deleted; the amino acid at position 2 is Ala or deleted; the amino acid at position 3 is Leu, Val or deleted; the amino acid at position 4 is Val, Met or Leu; the amino acid at position 7 is Gly or Ser; the amino acid at position 8 is Lys or Thr; the amino acid at position 10 is Phe or Tyr; the amino acid at position 11 is Glu or Arg; the amino acid at position 18 is Met or lie; the amino acid at position 19 is Gly, Pro or Ala; the amino acid at position 20 is Val or deleted; the amino acid at position 21 is Leu or Val; the amino acid at position 23 is Arg or Gln; the amino acid at position 37 is Val or Leu; the amino acid at position 38 is Arg or Asn; the amino acid at position 40 is Ala or Ser; the amino acid at position 43 is Asn or Asp; the amino acid at position 45 is Gly or Ala; the amino acid at position 46 is Gln or Glu; the amino acid at position 48 is Glu, Pro or Val; the amino acid at position 51 is Glu or Gly; the amino acid at position 52 is Lys, Arg or Thr; the amino acid at position 56 is Leu or Val; the amino acid at position 59 is Phe or Leu; the amino acid at position 66 is Pro or Ala; the amino acid at position 67 is Val, Pro or Thr; the amino acid at position 68 is Val, Arg, Phe or Gly; the amino acid at position 69 is Glu, Ala or Lys; the amino acid at position 70 is Trp, Thr, His, Tyr or Arg; the amino acid at position 71 is Arg, Pro or deleted; the amino acid at position 72 is Trp, Asp, Leu or deleted; the amino acid at position 73 is Pro, Gln, Asn, His or deleted; the amino acid at position 74 is Pro, Met or Thr; the amino acid at position 75 is Gln, His or Arg; the amino acid at position 76 is lie, Met or Leu; the amino acid at position 84 is lie or Val; the amino acid at position 91 is Trp or Phe; the amino acid at position 93 is Thr or lie; the amino acid at position 94 is Asp or Gly; the amino acid at position 96 is Arg or Ser; the amino acid at position 97 is Gln, Phe or Arg; the amino acid at position 98 is Ser or deleted; the amino acid at position 99 is Asp or Ala; the amino acid at position 100 is Thr or Ala; the amino acid at position 101 is Glu, Thr or Trp the amino acid at position 103 is His, Arg, Glu or Gln; the amino acid at position 105 is Thr or Pro; the amino acid at position 108 is Lys, Gln or Glu; the amino acid at position 109 is Leu or Val; the amino acid at position 111 is Ala or Thr; the amino acid at position 112 is lie, Arg, Thr or deleted; the amino acid at position 113 is Gln, Ala, Gly or deleted; the amino acid at position 114 is Arg, Glu or lie; the amino acid at position 115 is Glu or Gln; the amino acid at position 116 is Glu, Asn, Gln or Arg; the amino acid at position 117 is Asn, Val, Tyr or Phe; the amino acid at position 118 is Arg or Lys; the amino acid at position 119 is Trp or Ser; the amino acid at position 122 is Thr, Lys or Ala; the amino acid at position 124 is Ala or Thr; the amino acid at position 126 is Gly or Asp; the amino acid at position 127 is Met or Ala; the amino acid at position 128 is Asn or Lys; the amino acid at position 131 is Val, Ile or Thr; the amino acid at position 133 is lie or Val; the amino acid at position 134 is His or Tyr; the amino acid at position 135 is Ala or Gly; the amino acid at position 137 is Glu or Lys; the amino acid at position 139 is Gln or Glu; the amino acid at position 140 is Val, Arg or Leu; the amino acid at position 141 is Gly or Ser; the amino acid at position 142 is Val or Pro; the amino acid at position 144 is Thr, Leu, Phe or Tyr; the amino acid at position 145 is Met, Pro or Asn; the amino acid at position 146 is Ser, Gly or Asn; the amino acid at position 147 is Trp or Asn; the amino acid at position 148 is Ser, Ala or Pro; the amino acid at position 149 is Ser or deleted; the amino acid at position 150 is Val, Ile or Tyr; the amino acid at position 152 is Arg, Ala, Val or Gly; the amino acid at position 154 is Ser, Trp or Glu; the amino acid at position 156 is Leu, Asp or Gln; the amino acid at position 158 is Ser or Cys; the amino acid at position 159 is Val, Thr or lie; the amino acid at position 162 is Ser or Ala; the amino acid at position 163 is Gly or deleted; the amino acid at position 164 is Phe or deleted; the amino acid at position 165 is Arg or Ala; the amino acid at position 166 is Ala, Arg, Met or Phe; the amino acid at position 167 is Val or His; the amino acid at position 168 is Ser or Asn; the amino acid at position 169 is Val, His or Thr; the amino acid at position 170 is Phe or Val; the amino acid at position 171 is Glu, Asn or Asp; the amino acid at position 172 is Val, Ala, Arg or Glu; the amino acid at position 175 is Ser, Arg or Trp; the amino acid at position 176 is Val or lie; the amino acid at position 177 is Arg or lie; the amino acid at position 179 is Thr, lie, Val or Ser; the amino acid at position 180 is Leu, Phe or Thr; the amino acid at position 181 is Gly, Thr, Gln or Ser; the amino acid at position 182 is Ala, Leu, Phe or lie; the amino acid at position 183 is Thr or Gly; the amino acid at position 184 is Leu, Thr, Ser or Arg; the amino acid at position 185 is Arg, Gly, Asp or Ala; the amino acid at position 186 is Pro, Val or Gln; the amino acid at position 187 is Asp, Thr or Ser; the amino acid at position 188 is His, Gly or Ala; the amino acid at position 189 is Ala, Arg, Pro or deleted; the amino acid at position 190 is Leu, Asn or deleted; the amino acid at position 191 is Tyr or deleted; the amino acid at position 192 is Ser, lie, Val or Asn; the amino acid at position 193 is Thr or Asp; the amino acid at position 194 is Thr or Ser; the amino acid at position 195 is Met or Thr; the amino acid at position 196 is Gln, His, Leu or Ser; the amino acid at position 197 is Ala, Gly or Leu; the amino acid at position 198 is Thr, Glu or Ala; the amino acid at position 199 is Pro or Arg; the amino acid at position 200 is Asn, Ser, Thr or Gly; the amino acid at position 201 is Ala, Leu, Glu or Trp; the amino acid at position 202 is Ser, Asp, Phe or Leu; the amino acid at position 203 is His, Pro, Gly or Ser; the amino acid at position 204 is lie, Trp, His or Gly; the amino acid at position 205 is Ser, Asn or lie; the amino acid at position 206 is Ala, Gly, Asp, Tyr or Arg; the amino acid at position 207 is Phe, Val or Leu; the amino acid at position 208 is Asn, Ser, Pro or Leu; the amino acid at position 210 is Arg, Asp, Glu or Tyr; the amino acid at position 211 is lie, Ser or Thr; the amino acid at position 212 is Val, Ala or Asp; the amino acid at position 214 is Pro or Arg; the amino acid at position 215 is Ser or Thr; the amino acid at position 217 is Tyr or Phe; the amino acid at position 218 is Arg or Ser; the amino acid at position 219 is Val or Ala; the amino acid at position 220 is Cys, Leu or Ser; the amino acid at position 221 is Pro or His; the amino acid at position 222 is Leu, Arg or Ser; the amino acid at position 224 is Asn or Ser; the amino acid at position 225 is Asp, Arg or Thr; the amino acid at position 226 is Thr or Asn; the amino acid at position 227 is Asp, Leu or deleted; the amino acid at position 228 is Thr or deleted; the amino acid at position 229 is Tyr or deleted; the amino acid at position 230 is Leu or deleted; the amino acid at position 231 is Gly or deleted; the amino acid at position 232 is lie or deleted; the amino acid at position 233 is Pro or deleted; the amino acid at position 234 is Ala, Pro or deleted; the amino acid at position 235 is Asp, Ile or Val; the amino acid at position 236 is Val, Ser or Glu; the amino acid at position 237 is Ala, Phe or Tyr; the amino acid at position 238 is Ala or Thr; the amino acid at position 239 is Val, Ser or Gly; the amino acid at position 240 is Leu or lie; the amino acid at position 243 is Asp or Glu; the amino acid at position 249 is Asn or Ser; the amino acid at position 252 is Leu or Met; the amino acid at position 257 is Thr or Ser; the amino acid at position 259 is His or Leu; the amino acid at position 266 is Ala or Val; the amino acid at position 267 is Cys or Gly; the amino acid at position 268 is His, Arg or Tyr; the amino acid at position 272 is Asp or Glu; the amino acid at position 273 is Val, Met, Ile or Leu; the amino acid at position 274 is Val or Met; the amino acid at position 278 is Gly or Ala; the amino acid at position 279 is Glu or Val; the amino acid at position 281 is Leu or Ala; the amino acid at position 282 is Asn, Leu or lie; the amino acid at position 285 is Asn or Ser; the amino acid at position 286 is Lys, Asp or Glu; the amino acid at position 287 is Leu or Val; the amino acid at position 290 is Pro, Gln or Arg; the amino acid at position 291 is Leu or Val; the amino acid at position 292 is Lys or Val; the amino acid at position 293 is Glu or Gln; the amino acid at position 294 is Ser, Asn or Lys; the amino acid at position 295 is Thr or Ser; the amino acid at position 296 is Gln or His; the amino acid at position 297 is Leu or Met; the amino acid at position 300 is Ser or Thr; the amino acid at position 301 is Glu or Ala; the amino acid at position 302 is Ser, Pro or Ala; the amino acid at position 304 is Lys or Asn; the amino acid at position 313 is Val or lie; the amino acid at position 314 is His, Glu or Gln; the amino acid at position 315 is Ala, Cys or Ser; the amino acid at position 316 is Ala or Val; the amino acid at position 317 is Met or lie; the amino acid at position 319 is Met or lie; the amino acid at position 320 is Val or Gly; the amino acid at position 321 is Arg or Pro; the amino acid at position 322 is lie or Phe; the amino acid at position 323 is Gly or Val; the amino acid at position 324 is Leu or Ser; the amino acid at position 336 is Ser or Asn; the amino acid at position 339 is Asn, Lys or Arg; the amino acid at position 350 is Arg or Gln; the amino acid at position 351 is Glu or Asp; the amino acid at position 353 is Lys or Arg; the amino acid at position 354 is Gln or Arg; the amino acid at position 355 is Phe or Leu; the amino acid at position 356 is Lys or Arg; the amino acid at position 360 is lie, Val or Ala; the amino acid at position 365 is Leu or Phe; the amino acid at position 371 is or Glu; the amino acid at position 372 is or Lys; the amino acid at position 374 is Arg or Lys; the amino acid at position 376 is Phe or Leu; the amino acid at position 378 is Glu or Asp; the amino acid at position 381 is Leu or Val; the amino acid at position 388 is Ala or Ser; the amino acid at position 395 is Arg or Lys; the amino acid at position 396 is Glu, Gln or Gly; the amino acid at position 399 is Asp or Asn; the amino acid at position 400 is Asn, Thr or Asp; the amino acid at position 401 is Thr or Ala; the amino acid at position 402 is Phe, Ile or Leu; the amino acid at position 406 is Asp or Glu; the amino acid at position 408 is Leu or Met; the amino acid at position 410 is Gly or Leu; the amino acid at position 414 is Ala or Glu; the amino acid at position 416 is Ser, Asn or Asp; the amino acid at position 417 is Ser, Arg or Gly; the amino acid at position 423 is Lys or Gln; the amino acid at position 431 is Arg or Lys; the amino acid at position 432 is Gln or Glu; the amino acid at position 436 is Arg or Glu; the amino acid at position 440 is Asn or Arg; the amino acid at position 442 is Leu or Val; the amino acid at position 447 is Ser, Lys or Arg; the amino acid at position 448 is Ala or Ser; the amino acid at position 451 is Gln or Met; the amino acid at position 453 is Gly or Ala; the amino acid at position 455 is Ala or Val; the amino acid at position 457 is Leu or Val; the amino acid at position 467 is Val or Ala; the amino acid at position 471 is Gly or Ala; the amino acid at position 475 is Ser or Asn; the amino acid at position 483 is Gly or Ala; the amino acid at position 493 is Gln or Gly; the amino acid at position 504 is Val or lie; the amino acid at position 506 is Asp or His; the amino acid at position 509 is Asp or Asn; the amino acid at position 510 is Ser or Ala; the amino acid at position 512 is Glu or Asp; the amino acid at position 515 is Gly or Ser; the amino acid at position 516 is Gln or His; the amino acid at position 517 is lie or Leu; the amino acid at position 519 is Asp, Gly or Gln; the amino acid at position 522 is Val, Glu, Pro or Val; the amino acid at position 525 is Glu or Asp; the amino acid at position 526 is Leu or Met; the amino acid at position 539 is Val or lie; the amino acid at position 555 is Val or Ala; the amino acid at position 557 is Arg or Lys; the amino acid at position 563 is Val or Met; the amino acid at position 571 is Ser or Cys; the amino acid at position 575 is Val or Glu; the amino acid at position 577 is Met or lie; the amino acid at position 579 is Glu or Gln; the amino acid at position 583 is Asp or Glu; the amino acid at position 589 is Met or Leu; the amino acid at position 590 is Met or Leu; the amino acid at position 593 is Met or lie; the amino acid at position 595 is Arg or Gln; the amino acid at position 596 is Ser or Thr; the amino acid at position 597 is Gln or His; the amino acid at position 607 is Ala or Val; the amino acid at position 608 is Asp or Asn; the amino acid at position 612 is Tyr, His or Phe; the amino acid at position 617 is Thr or lie; the amino acid at position 618 is Gln or His; the amino acid at position 625 is Arg or Ser; the amino acid at position 626 is Met or lie; the amino acid at position 628 is Leu or lie; the amino acid at position 633 is lie or Met; the amino acid at position 634 is Leu or Met; the amino acid at position 642 is Arg or Met; the amino acid at position 648 is Met or Thr; the amino acid at position 651 is Glu or Gln; the amino acid at position 654 is Thr, Val or Ala; the amino acid at position 658 is Gly or Arg; the amino acid at position 663 is Gly or Ala; the amino acid at position 664 is Asp or Asn; the amino acid at position 668 is Ala or Thr; the amino acid at position 669 is Gln or His; the amino acid at position 671 is Asn or Ser the amino acid at position 675 is lie, Val or Ser; the amino acid at position 678 is Met, lie, Ala or Thr; the amino acid at position 682 is Pro or Gln; the amino acid at position 683 is Ser or Pro; the amino acid at position 685 is Asp or Asn; the amino acid at position 694 is Asp or Gly; the amino acid at position 697 is Asn or Ser; the amino acid at position 704 is Glu or Gly; the amino acid at position 714 is Ala or Gly; the amino acid at position 721 is Ser or Phe; the amino acid at position 722 is Ser or Asn; the amino acid at position 724 is Ser or Thr; the amino acid at position 734 is His or Gln; the amino acid at position 736 is Val or Ala; the amino acid at position 737 is Lys or Gln; the amino acid at position 739 is Ala or Ser; the amino acid at position 740 is Ser or Met; the amino acid at position 741 is Gly or Asn; the amino acid at position 742 is lie or Gly; the amino acid at position 743 is Gly or deleted; the amino acid at position 745 is Gly or Asp; the amino acid at position 751 is Thr, Ser or Ala; the amino acid at position 753 is Gln or Arg; the amino acid at position 754 is Thr or Ser; the amino acid at position 756 is Thr or lie; the amino acid at position 757 is Val or lie; the amino acid at position 766 is lie or Val; the amino acid at position 773 is Asp or Glu; the amino acid at position 774 is Gln or Glu; the amino acid at position 776 is Leu or Met; the amino acid at position 777 is Pro or Thr; the amino acid at position 782 is Ala, Asp or Val; the amino acid at position 786 is Tyr or Phe; the amino acid at position 787 is His or Gln; the amino acid at position 788 is Tyr or Met; the amino acid at position 789 is Ala or Arg; the amino acid at position 790 is Tyr or Thr; the amino acid at position 791 is Arg or Ala; the amino acid at position 792 is Leu or Ser; the amino acid at position 796 is Asp or Glu; the amino acid at position 797 is Ser, Thr or Ala the amino acid at position 802 is Glu or Gln; the amino acid at position 806 is Gln, Asp, Glu or His; the amino acid at position 810 is Lys or Thr; the amino acid at position 819 is Arg or His; the amino acid at position 829 is Lys, Ser, Ala or Pro; the amino acid at position 832 is Ala, Lys or Glu; the amino acid at position 833 is Gly or Glu; the amino acid at position 842 is Leu or Pro; the amino acid at position 847 is Gln or Glu; the amino acid at position 848 is lie or Val; the amino acid at position 849 is Val or Ala; the amino acid at position 855 is Thr or Met; the amino acid at position 860 is lie or Val; and the amino acid at position 864 is His or Gln.

[0137] In some embodiments the PtIP-83 polypeptide is a variant of SEQ ID NO: 1, wherein the amino acid at position 1 is Met or deleted; the amino acid at position 2 is Ala or deleted; the amino acid at position 3 is Leu, Val, Ile or deleted; the amino acid at position 4 is Val, Met, Ile or Leu; the amino acid at position 7 is Gly, Thr or Ser; the amino acid at position 8 is Lys, Arg, Ser or Thr; the amino acid at position 10 is Phe, Trp or Tyr; the amino acid at position 11 is Glu, Asp, Lys or Arg; the amino acid at position 18 is Met, Val, Leu or lie; the amino acid at position 19 is Gly, Pro or Ala; the amino acid at position 20 is Val, lie, Leu or deleted; the amino acid at position 21 is Leu, Ile or Val; the amino acid at position 23 is Arg, Lys, Asn or Gln; the amino acid at position 37 is Val, Ile or Leu; the amino acid at position 38 is Arg, Lys, Gln or Asn; the amino acid at position 40 is Ala, Gly, Thr or Ser; the amino acid at position 43 is Asn, Gln, Glu or Asp; the amino acid at position 45 is Gly or Ala; the amino acid at position 46 is Gln, Asp, Asn or Glu; the amino acid at position 48 is Glu, Asp, Pro, lie, Leu or Val; the amino acid at position 51 is Glu, Asp, Ala or Gly; the amino acid at position 52 is Lys, Arg, Ser or Thr; the amino acid at position 56 is Leu, Ile or Val; the amino acid at position 59 is Phe, lie, Val or Leu; the amino acid at position 66 is Pro, Gly or Ala; the amino acid at position 67 is Val, Pro, lie, Leu, Ser or Thr; the amino acid at position 68 is Val, Arg, Phe, lie, Leu, Lys or Gly; the amino acid at position 69 is Glu, Ala, Asp, Gly, Arg or Lys; the amino acid at position 70 is Trp, Thr, His, Tyr, Lys or Arg; the amino acid at position 71 is Arg, Pro, Lys or deleted; the amino acid at position 72 is Trp, Asp, Leu, lie, Val, Glu or deleted; the amino acid at position 73 is Pro, Gln, Asn, His or deleted; the amino acid at position 74 is Pro, Met, Ser or Thr; the amino acid at position 75 is Gln, His, Asn, Lys or Arg; the amino acid at position 76 is lie, Met, Val or Leu; the amino acid at position 84 is lie, Leu or Val; the amino acid at position 91 is Trp or Phe; the amino acid at position 93 is Thr, Ser, Leu, Val or lie; the amino acid at position 94 is Asp, Glu, Ala or Gly; the amino acid at position 96 is Arg, Lys, Thr or Ser; the amino acid at position 97 is Gln, Phe, Asn, Lys or Arg; the amino acid at position 98 is Ser, Thr or deleted; the amino acid at position 99 is Asp, Glu, Gly or Ala; the amino acid at position 100 is Thr, Ser, Gly or Ala; the amino acid at position 101 is Glu, Thr, Asp, Ser or Trp the amino acid at position 103 is His, Arg, Lys, Glu or Gln; the amino acid at position 105 is Thr, Ser or Pro; the amino acid at position 108 is Lys, Arg, Asn, Asp, Gln or Glu; the amino acid at position 109 is Leu, Ile or Val; the amino acid at position 111 is Ala, Ser or Thr; the amino acid at position 112 is lie, Arg, Thr, Leu, Val, Lys, Ser or deleted; the amino acid at position 113 is Gln, Ala, Gly, Asn or deleted; the amino acid at position 114 is Arg, Glu, Lys, Asp or lie; the amino acid at position 115 is Glu, Asp, Asn or Gln; the amino acid at position 116 is Glu, Asn, Gln, Asp, Lys or Arg; the amino acid at position 117 is Asn, Val, Tyr, lie, Leu, Gln, Trp or Phe; the amino acid at position 118 is Arg or Lys; the amino acid at position 119 is Trp, Thr or Ser; the amino acid at position 122 is Thr, Lys, Ser, Arg or Ala; the amino acid at position 124 is Ala, Gly, Ser or Thr; the amino acid at position 126 is Gly, Ala, Glu or Asp; the amino acid at position 127 is Met, Gly or Ala; the amino acid at position 128 is Asn, Gln, Arg or Lys; the amino acid at position 131 is Val, lie, Leu, Ser or Thr; the amino acid at position 133 is lie, Leu or Val; the amino acid at position 134 is His or Tyr; the amino acid at position 135 is Ala or Gly; the amino acid at position 137 is Glu, Asp, Arg or Lys; the amino acid at position 139 is Gln, Asn, Asp or Glu; the amino acid at position 140 is Val, Arg, lie, Lys or Leu; the amino acid at position 141 is Gly, Ala, Thr or Ser; the amino acid at position 142 is Val, lie, Leu or Pro; the amino acid at position 144 is Thr, Leu, Phe, lie, Val or Tyr; the amino acid at position 145 is Met, Pro, Gln or Asn; the amino acid at position 146 is Ser, Gly, Thr, Ala, Gln or Asn; the amino acid at position 147 is Trp, Gln, Tyr or Asn; the amino acid at position 148 is Ser, Ala, Thr, Gly or Pro; the amino acid at position 149 is Ser, Thr or deleted; the amino acid at position 150 is Val, lie, Leu or Tyr; the amino acid at position 152 is Arg, Ala, Val, lie, Leu, Lys or Gly; the amino acid at position 154 is Ser, Trp, Thr, Asp or Glu; the amino acid at position 156 is Leu, Asp, lie, Val, Asn, Glu or Gln; the amino acid at position 158 is Ser, Thr or Cys; the amino acid at position 159 is Val, Thr, Leu or lie; the amino acid at position 162 is Ser, Thr, Gly or Ala; the amino acid at position 163 is Gly, Ala or deleted; the amino acid at position 164 is Phe or deleted; the amino acid at position 165 is Arg, Lys, Gly or Ala; the amino acid at position 166 is Ala, Arg, Met, Lys or Phe; the amino acid at position 167 is Val, lie, Leu or His; the amino acid at position 168 is Ser, Thr, Gln or Asn; the amino acid at position 169 is Val, His, lie, Leu, Ser or Thr; the amino acid at position 170 is Phe, lie, Leu or Val; the amino acid at position 171 is Glu, Asn, Gln or Asp; the amino acid at position 172 is Val, Ala, Arg, lie, Leu, Gly, Lys, Asp or Glu; the amino acid at position 175 is Ser, Arg, Thr, Lys or Trp; the amino acid at position 176 is Val, Leu or lie; the amino acid at position 177 is Arg, Lys, Leu, Val or lie; the amino acid at position 179 is Thr, lie, Val, Leu or Ser; the amino acid at position 180 is Leu, Phe, lie, Val, Ser or Thr; the amino acid at position 181 is Gly, Thr, Gln, Asn or Ser; the amino acid at position 182 is Ala, Leu, Phe, Val or lie; the amino acid at position 183 is Thr, Ser, Ala or Gly; the amino acid at position 184 is Leu, Thr, Ser, lie, Val, Lys or Arg; the amino acid at position 185 is Arg, Gly, Asp, Lys, Glu or Ala; the amino acid at position 186 is Pro, Val, lie, Leu, Asn or Gln; the amino acid at position 187 is Asp, Thr, Glu or Ser; the amino acid at position 188 is His, Gly or Ala; the amino acid at position 189 is Ala, Arg, Pro, Lys, Gly or deleted; the amino acid at position 190 is Leu, Asn, lie, Val, Gln or deleted; the amino acid at position 191 is Tyr or deleted; the amino acid at position 192 is Ser, lie, Val, Leu, Thr or Asn; the amino acid at position 193 is Thr, Ser, Glu or Asp; the amino acid at position 194 is Thr or Ser; the amino acid at position 195 is Met or Thr; the amino acid at position 196 is Gln, His, Leu, Asn, lie, Val, Thr or Ser; the amino acid at position 197 is Ala, Gly, lie, Val or Leu; the amino acid at position 198 is Thr, Glu, Ser, Asp, Gly or Ala; the amino acid at position 199 is Pro, Lys or Arg; the amino acid at position 200 is Asn, Ser, Thr, Gln, Ala or Gly; the amino acid at position 201 is Ala, Leu, Glu, lie, Asp or Trp; the amino acid at position 202 is Ser, Asp, Phe, Ile, Val, Thr, Glu or Leu; the amino acid at position 203 is His, Pro, Gly, Ala, Thr or Ser; the amino acid at position 204 is lie, Trp, His, Leu, Val, Ala or Gly; the amino acid at position 205 is Ser, Asn, Leu, Val, Thr, Gln or lie; the amino acid at position 206 is Ala, Gly, Asp, Tyr, Glu, Lys or Arg; the amino acid at position 207 is Phe, Val, Ile or Leu; the amino acid at position 208 is Asn, Ser, Pro, Gln, Thr, Val, Ile or Leu; the amino acid at position 210 is Arg, Asp, Glu, Lys, Ser or Tyr; the amino acid at position 211 is lie, Ser, Leu, Val or Thr; the amino acid at position 212 is Val, Ala, lie, Leu, Glu, Gly or Asp; the amino acid at position 214 is Pro, Lys or Arg; the amino acid at position 215 is Ser or Thr; the amino acid at position 217 is Tyr or Phe; the amino acid at position 218 is Arg, Lys, Thr or Ser; the amino acid at position 219 is Val, lie, Leu or Ala; the amino acid at position 220 is Cys, Leu, lie, Val, Thr or Ser; the amino acid at position 221 is Pro or His; the amino acid at position 222 is Leu, Arg, Lys, lie, Val, Thr or Ser; the amino acid at position 224 is Asn, Gln, Thr or Ser; the amino acid at position 225 is Asp, Arg, Glu, Lys, Ser or Thr; the amino acid at position 226 is Thr, Ser, Gln or Asn; the amino acid at position 227 is Asp, Leu, Glu, lie, Val or deleted; the amino acid at position 228 is Thr, Ser or deleted; the amino acid at position 229 is Tyr or deleted; the amino acid at position 230 is Leu, lie, Val or deleted; the amino acid at position 231 is Gly, Ala or deleted; the amino acid at position 232 is lie, Leu, Val or deleted; the amino acid at position 233 is Pro or deleted; the amino acid at position 234 is Ala, Pro, Gly or deleted; the amino acid at position 235 is Asp, lie, Leu, Glu or Val; the amino acid at position 236 is Val, Ser, lie, Leu, Thr, Asp or Glu; the amino acid at position 237 is Ala, Phe or Tyr; the amino acid at position 238 is Ala, Gly, Ser or Thr; the amino acid at position 239 is Val, Ser, lie, Leu, Thr, Ala or Gly; the amino acid at position 240 is Leu, Val or lie; the amino acid at position 243 is Asp or Glu; the amino acid at position 249 is Asn, Gln, Thr or Ser; the amino acid at position 252 is Leu, lie, Val or Met; the amino acid at position 257 is Thr or Ser; the amino acid at position 259 is His, lie, Val or Leu; the amino acid at position 266 is Ala, lie, Leu or Val; the amino acid at position 267 is Cys, Ala or Gly; the amino acid at position 268 is His, Arg, Lys or Tyr; the amino acid at position 272 is Asp or Glu; the amino acid at position 273 is Val, Met, Ile or Leu; the amino acid at position 274 is Val, lie, Leu or Met; the amino acid at position 278 is Gly or Ala; the amino acid at position 279 is Glu, Asp, Gly or Val; the amino acid at position 281 is Leu, lie, Val, Gly or Ala; the amino acid at position 282 is Asn, Leu or lie; the amino acid at position 285 is Asn, Gln, Thr or Ser; the amino acid at position 286 is Lys, Asp, Arg or Glu; the amino acid at position 287 is Leu, Ile or Val; the amino acid at position 290 is Pro, Gln, Asn, Lys or Arg; the amino acid at position 291 is Leu, Ile or Val; the amino acid at position 292 is Lys, Arg, Ile, Leu or Val; the amino acid at position 293 is Glu, Asp, Asn or Gln; the amino acid at position 294 is Ser, Asn, Thr, Gln, Arg or Lys; the amino acid at position 295 is Thr or Ser; the amino acid at position 296 is Gln, Asn or His; the amino acid at position 297 is Leu, Ile, Val or Met; the amino acid at position 300 is Ser or Thr; the amino acid at position 301 is Glu, Asp, Gly or Ala; the amino acid at position 302 is Ser, Pro, Thr, Gly or Ala; the amino acid at position 304 is Lys, Arg, Gln or Asn; the amino acid at position 313 is Val, Leu or Ile; the amino acid at position 314 is His, Glu, Asn, Asp or Gln; the amino acid at position 315 is Ala, Cys, Gly, Thr or Ser; the amino acid at position 316 is Ala, Ile, Leu or Val; the amino acid at position 317 is Met, Leu, Val or Ile; the amino acid at position 319 is Met, Leu, Val or Ile; the amino acid at position 320 is Val, Ile, Leu, Ala or Gly; the amino acid at position 321 is Arg, Lys or Pro; the amino acid at position 322 is Ile, Leu, Val or Phe; the amino acid at position 323 is Gly, Ile, Leu or Val; the amino acid at position 324 is Leu, Ile, Val, Thr or Ser; the amino acid at position 336 is Ser, Thr, Gln or Asn; the amino acid at position 339 is Asn, Lys, Gln or Arg; the amino acid at position 350 is Arg, Lys, Asn or Gln; the amino acid at position 351 is Glu or Asp; the amino acid at position 353 is Lys or Arg; the amino acid at position 354 is Gln, Asn, Lys or Arg; the amino acid at position 355 is Phe, Ile, Leu or Leu; the amino acid at position 356 is Lys or Arg; the amino acid at position 360 is Ile, Val, Leu, Gly or Ala; the amino acid at position 365 is Leu, Ile, Val or Phe; the amino acid at position 371 is or Glu or Asp; the amino acid at position 372 is or Lys or Arg; the amino acid at position 374 is Arg or Lys; the amino acid at position 376 is Phe, Ile, Val or Leu; the amino acid at position 378 is Glu or Asp; the amino acid at position 381 is Leu, Ile or Val; the amino acid at position 388 is Ala, Thr, Gly or Ser; the amino acid at position 395 is Arg or Lys; the amino acid at position 396 is Glu, Gln, Asp, Asn, Ala or Gly; the amino acid at position 399 is Asp, Gln, Glu or Asn; the amino acid at position 400 is Asn, Thr, Ser, Glu, Gln or Asp; the amino acid at position 401 is Thr, Ser, Gly or Ala; the amino acid at position 402 is Phe, Ile, Val or Leu; the amino acid at position 406 is Asp or Glu; the amino acid at position 408 is Leu, Ile, Val or Met; the amino acid at position 410 is Gly, Ile, Val, Ala or Leu; the amino acid at position 414 is Ala, Gly, Asp or Glu; the amino acid at position 416 is Ser, Asn, Thr, Gln, Glu or Asp; the amino acid at position 417 is Ser, Arg, Lys, Thr, Ala or Gly; the amino acid at position 423 is Lys, Arg, Asn or Gln; the amino acid at position 431 is Arg or Lys; the amino acid at position 432 is Gln, Asn, Asp or Glu; the amino acid at position 436 is Arg, Lys, Asp or Glu; the amino acid at position 440 is Asn, Gln, Lys or Arg; the amino acid at position 442 is Leu, Ile or Val; the amino acid at position 447 is Ser, Lys, Thr or Arg; the amino acid at position 448 is Ala, Gly, Thr or Ser; the amino acid at position 451 is Gln, Asn or Met; the amino acid at position 453 is Gly or Ala; the amino acid at position 455 is Ala, Leu, Ile or Val; the amino acid at position 457 is Leu, Ile or Val; the amino acid at position 467 is Val, Ile, Leu, Gly or Ala; the amino acid at position 471 is Gly or Ala; the amino acid at position 475 is Ser, Thr, Gln or Asn; the amino acid at position 483 is Gly or Ala; the amino acid at position 493 is Gln, Asn or Gly; the amino acid at position 504 is Val, Leu or Ile; the amino acid at position 506 is Asp, Glu or His; the amino acid at position 509 is Asp, Glu, Gln or Asn; the amino acid at position 510 is Ser, Thr, Gly or Ala; the amino acid at position 512 is Glu or Asp; the amino acid at position 515 is Gly, Ala, Thr or Ser; the amino acid at position 516 is Gln, Asn or His; the amino acid at position 517 is Ile, Val or Leu; the amino acid at position 519 is Asp, Asn, Glu, Gly or Gln; the amino acid at position 522 is Val, Glu, Pro, Ile, Leu or Asp; the amino acid at position 525 is Glu or Asp; the amino acid at position 526 is Leu, Ile, Val or Met; the amino acid at position 539 is Val, Leu or Ile; the amino acid at position 555 is Val, Leu, Ile or Ala; the amino acid at position 557 is Arg or Lys; the amino acid at position 563 is Val, Leu, Ile or Met; the amino acid at position 571 is Ser, Thr or Cys; the amino acid at position 575 is Val, Leu, Ile, Asp or Glu; the amino acid at position 577 is Met, Leu, Val or Ile; the amino acid at position 579 is Glu, Asp, Asn or Gln; the amino acid at position 583 is Asp or Glu; the amino acid at position 589 is Met, Ile, Val or Leu; the amino acid at position 590 is Met, Ile, Val or Leu; the amino acid at position 593 is Met, Leu, Val or Ile; the amino acid at position 595 is Arg, Lys, Asn or Gln; the amino acid at position 596 is Ser or Thr; the amino acid at position 597 is Gln, Asn or His; the amino acid at position 607 is Ala, Gly, Ile, Leu or Val; the amino acid at position 608 is Asp, Glu, Gln or Asn; the amino acid at position 612 is Tyr, His or Phe; the amino acid at position 617 is Thr, Ser, Leu, Val or Ile; the amino acid at position 618 is Gln, Asn or His; the amino acid at position 625 is Arg, Lys, Thr or Ser; the amino acid at position 626 is Met, Leu, Val or Ile; the amino acid at position 628 is Leu, Val or Ile; the amino acid at position 633 is Ile, Leu, Val or Met; the amino acid at position 634 is Leu, Ile, Val or Met; the amino acid at position 642 is Arg, Lys or Met; the amino acid at position 648 is Met, Ser or Thr; the amino acid at position 651 is Glu, Asp, Asn or Gln; the amino acid at position 654 is Thr, Val, Ser, Ile, Leu, Gly or Ala; the amino acid at position 658 is Gly, Lys, Ala or Arg; the amino acid at position 663 is Gly or Ala; the amino acid at position 664 is Asp, Glu, Gln or Asn; the amino acid at position 668 is Ala, Gly, Ser or Thr; the amino acid at position 669 is Gln, Asn or His; the amino acid at position 671 is Asn, Gln, Thr or Ser the amino acid at position 675 is lie, Val, lie, Thr or Ser; the amino acid at position 678 is Met, lie, Ala, Leu, Ser or Thr; the amino acid at position 682 is Pro, Asn or Gln; the amino acid at position 683 is Ser, Thr or Pro; the amino acid at position 685 is Asp, Glu, Asp or Asn; the amino acid at position 694 is Asp, Glu, Ala or Gly; the amino acid at position 697 is Asn, Gln, Thr or Ser; the amino acid at position 704 is Glu, Asp, Ala or Gly; the amino acid at position 714 is Ala or Gly; the amino acid at position 721 is Ser, Thr or Phe; the amino acid at position 722 is Ser, Thr, Gln or Asn; the amino acid at position 724 is Ser or Thr; the amino acid at position 734 is His, Asn or Gln; the amino acid at position 736 is Val, Leu, Ile or Ala; the amino acid at position 737 is Lys, Arg, Asn or Gln; the amino acid at position 739 is Ala, Gly, Thr or Ser; the amino acid at position 740 is Ser, Thr or Met; the amino acid at position 741 is Gly, Ala, Gln or Asn; the amino acid at position 742 is lie, Leu, Val, Ala or Gly; the amino acid at position 743 is Gly or deleted; the amino acid at position 745 is Gly, Ala, Glu or Asp; the amino acid at position 751 is Thr, Ser, Gly or Ala; the amino acid at position 753 is Gln, Asn, Lys or Arg; the amino acid at position 754 is Thr or Ser; the amino acid at position 756 is Thr, Ser, Leu, Val or lie; the amino acid at position 757 is Val, Leu or lie; the amino acid at position 766 is lie, Leu or Val; the amino acid at position 773 is Asp or Glu; the amino acid at position 774 is Gln, Asn, Asp or Glu; the amino acid at position 776 is Leu, lie, Val or Met; the amino acid at position 777 is Pro, Ser or Thr; the amino acid at position 782 is Ala, Asp, Glu, lie, Leu or Val; the amino acid at position 786 is Tyr or Phe; the amino acid at position 787 is His, Asn or Gln; the amino acid at position 788 is Tyr or Met; the amino acid at position 789 is Ala, Lys or Arg; the amino acid at position 790 is Tyr or Thr; the amino acid at position 791 is Arg, Lys, Gly or Ala; the amino acid at position 792 is Leu, lie, Val, Thr or Ser; the amino acid at position 796 is Asp or Glu; the amino acid at position 797 is Ser, Thr or Ala the amino acid at position 802 is Glu, Lys, Asp, Asn or Gln; the amino acid at position 806 is Gln, Asp, Glu, Asn or His; the amino acid at position 810 is Lys, Arg or Thr; the amino acid at position 819 is Arg, Lys or His; the amino acid at position 829 is Lys, Ser, Ala or Pro; the amino acid at position 832 is Ala, Lys, Arg, Asp or Glu; the amino acid at position 833 is Gly, Ala, Asp or Glu; the amino acid at position 842 is Leu, lie, Val or Pro; the amino acid at position 847 is Gln, Asn, Asp or Glu; the amino acid at position 848 is lie, Leu or Val; the amino acid at position 849 is Val, Leu, lie, Gly or Ala; the amino acid at position 855 is Thr, Ser or Met; the amino acid at position 860 is lie, Leu or Val; the amino acid at position 864 is His, Asn or Gln; In some embodiments the PtIP-83 polypeptide is a variant of SEQ ID NO: 1, wherein the amino acid at position 1 is Met or deleted; the amino acid at position 2 is Ala or deleted; the amino acid at position 3 is Leu, Val, Ile or deleted; the amino acid at position 4 is Val, Met, Ile or Leu; the amino acid at position 7 is Gly, Thr or Ser; the amino acid at position 8 is Lys, Arg, Ser or Thr; the amino acid at position 10 is Phe, Trp or Tyr; the amino acid at position 11 is Glu, Asp, Lys or Arg; the amino acid at position 18 is Met, Val, Leu or lie; the amino acid at position 19 is Gly, Pro or Ala; the amino acid at position 20 is Val, lie, Leu or deleted; the amino acid at position 21 is Leu, Ile or Val; the amino acid at position 23 is Arg, Lys, Asn or Gln; the amino acid at position 37 is Val, Ile or Leu; the amino acid at position 38 is Arg, Lys, Gln or Asn; the amino acid at position 40 is Ala, Gly, Thr or Ser; the amino acid at position 43 is Asn, Gln, Glu or Asp; the amino acid at position 45 is Gly or Ala; the amino acid at position 46 is Gln, Asp, Asn or Glu; the amino acid at position 48 is Glu, Asp, Pro, lie, Leu or Val; the amino acid at position 51 is Glu, Asp, Ala or Gly; the amino acid at position 52 is Lys, Arg, Ser or Thr; the amino acid at position 53 is Val, Ala, Cys or Thr; the amino acid at position 54 is Lys, Ala, Cys, Asp, Glu, Gly, His, lie, Leu, Met, Asn, Gln, Arg, Ser or Thr; the amino acid at position 55 is Arg, Ala, Asp, Glu, Phe, Gly, His, Lys, Leu, Met, Asn, Gln, Ser, Thr, Val, Trp or Tyr; the amino acid at position 56 is Leu, Glu, Phe, lie, Met, Thr or Val; the amino acid at position 57 is Tyr, Cys, lie, Leu, Met, Thr or Val; the amino acid at position 58 is Val, Cys, Ile or Leu; the amino acid at position 59 is Phe, Leu, Met, Val or Tyr; the amino acid at position 60 is Ala, Cys, Gly, Ser, Thr or Val; the amino acid at position 61 is Asp, Glu, His or Ser; the amino acid at position 62 is Val, Ala, Cys, lie, Leu or Thr; the amino acid at position 63 is Val, Ala, Cys, lie, Leu, Met or Thr; the amino acid at position 64 is Glu, Ala, Cys, Phe, Gly, His, lie, Leu, Met, Asn, Gln, Arg, Ser, Thr, Val, Trp or Tyr; the amino acid at position 65 is Leu, Ala, Cys, Phe, His, lie, Met, Asn, Gln, Thr, Val or Trp; the amino acid at position 66 is Pro, Asp, Gly, Met, Gln or Arg; the amino acid at position 67 is Val, Pro, lie, Leu, Ser or Thr; the amino acid at position 68 is Val, Arg, Phe, lie, Leu, Lys or Gly; the amino acid at position 69 is Glu, Ala, Asp, Gly, Arg or Lys; the amino acid at position 70 is Trp, Thr, His, Tyr, Lys or Arg; the amino acid at position 71 is Arg, Pro, Lys or deleted; the amino acid at position 72 is Trp, Asp, Leu, lie, Val, Glu or deleted; the amino acid at position 73 is Pro, Gln, Asn, His or deleted; the amino acid at position 74 is Pro, Met, Ser or Thr; the amino acid at position 75 is Gln, His, Asn, Lys or Arg; the amino acid at position 76 is lie, Met, Val or Leu; the amino acid at position 84 is lie, Leu or Val; the amino acid at position 91 is Trp or Phe; the amino acid at position 93 is Thr, Ser, Leu, Val or lie; the amino acid at position 94 is Asp, Glu, Ala or Gly; the amino acid at position 96 is Arg, Lys, Thr or Ser; the amino acid at position 97 is Gln, Phe, Asn, Lys or Arg; the amino acid at position 98 is Ser, Thr or deleted; the amino acid at position 99 is Asp, Glu, Gly or Ala; the amino acid at position 100 is Thr, Ser, Gly or Ala; the amino acid at position 101 is Glu, Thr, Asp, Ser or Trp the amino acid at position 103 is His, Arg, Lys, Glu or Gln; the amino acid at position 105 is Thr, Ser or Pro; the amino acid at position 108 is Lys, Arg, Asn, Asp, Gln or Glu; the amino acid at position 109 is Leu, Ile or Val; the amino acid at position 111 is Ala, Ser or Thr; the amino acid at position 112 is Ile, Arg, Thr, Leu, Val, Lys, Ser or deleted; the amino acid at position 113 is Gln, Ala, Gly, Asn or deleted; the amino acid at position 114 is Arg, Glu, Lys, Asp or Ile; the amino acid at position 115 is Glu, Asp, Asn or Gln; the amino acid at position 116 is Glu, Asn, Gln, Asp, Lys or Arg; the amino acid at position 117 is Asn, Val, Tyr, Ile, Leu, Gln, Trp or Phe; the amino acid at position 118 is Arg or Lys; the amino acid at position 119 is Trp, Thr or Ser; the amino acid at position 122 is Thr, Lys, Ser, Arg or Ala; the amino acid at position 124 is Ala, Gly, Ser or Thr; the amino acid at position 126 is Gly, Ala, Glu or Asp; the amino acid at position 127 is Met, Gly or Ala; the amino acid at position 128 is Asn, Gln, Arg or Lys; the amino acid at position 131 is Val, Ile, Leu, Ser or Thr; the amino acid at position 133 is Ile, Leu or Val; the amino acid at position 134 is His or Tyr; the amino acid at position 135 is Ala or Gly; the amino acid at position 137 is Glu, Asp, Arg or Lys; the amino acid at position 139 is Gln, Asn, Asp or Glu; the amino acid at position 140 is Val, Arg, Ile, Lys or Leu; the amino acid at position 141 is Gly, Ala, Thr or Ser; the amino acid at position 142 is Val, Ile, Leu or Pro; the amino acid at position 144 is Thr, Leu, Phe, Ile, Val or Tyr; the amino acid at position 145 is Met, Pro, Gln or Asn; the amino acid at position 146 is Ser, Gly, Thr, Ala, Gln or Asn; the amino acid at position 147 is Trp, Gln, Tyr or Asn; the amino acid at position 148 is Ser, Ala, Thr, Gly or Pro; the amino acid at position 149 is Ser, Thr or deleted; the amino acid at position 150 is Val, Ile, Leu or Tyr; the amino acid at position 152 is Arg, Ala, Val, Ile, Leu, Lys or Gly; the amino acid at position 154 is Ser, Trp, Thr, Asp or Glu; the amino acid at position 156 is Leu, Asp, Ile, Val, Asn, Glu or Gln; the amino acid at position 158 is Ser, Thr or Cys; the amino acid at position 159 is Val, Thr, Leu or Ile; the amino acid at position 162 is Ser, Thr, Gly or Ala; the amino acid at position 163 is Gly, Ala or deleted; the amino acid at position 164 is Phe or deleted; the amino acid at position 165 is Arg, Lys, Gly or Ala; the amino acid at position 166 is Ala, Arg, Met, Lys or Phe; the amino acid at position 167 is Val, Ile, Leu or His; the amino acid at position 168 is Ser, Thr, Gln or Asn; the amino acid at position 169 is Val, His, Ile, Leu, Ser or Thr; the amino acid at position 170 is Phe, Ile, Leu or Val; the amino acid at position 171 is Glu, Asn, Gln or Asp; the amino acid at position 172 is Val, Ala, Arg, Ile, Leu, Gly, Lys, Asp or Glu; the amino acid at position 175 is Ser, Arg, Thr, Lys or Trp; the amino acid at position 176 is Val, Leu or Ile; the amino acid at position 177 is Arg, Lys, Leu, Val or Ile; the amino acid at position 179 is Thr, Ile, Val, Leu or Ser; the amino acid at position 180 is Leu, Phe, Ile, Val, Ser or Thr; the amino acid at position 181 is Gly, Thr, Gln, Asn or Ser; the amino acid at position 182 is Ala, Leu, Phe, Val or lie; the amino acid at position 183 is Thr, Ser, Ala or Gly; the amino acid at position 184 is Leu, Thr, Ser, lie, Val, Lys or Arg; the amino acid at position 185 is Arg, Gly, Asp, Lys, Glu or Ala; the amino acid at position 186 is Pro, Val, lie, Leu, Asn or Gln; the amino acid at position 187 is Asp, Thr, Glu or Ser; the amino acid at position 188 is His, Gly or Ala; the amino acid at position 189 is Ala, Arg, Pro, Lys, Gly or deleted; the amino acid at position 190 is Leu, Asn, lie, Val, Gln or deleted; the amino acid at position 191 is Tyr or deleted; the amino acid at position 192 is Ser, lie, Val, Leu, Thr or Asn; the amino acid at position 193 is Thr, Ser, Glu or Asp; the amino acid at position 194 is Thr or Ser; the amino acid at position 195 is Met or Thr; the amino acid at position 196 is Gln, His, Leu, Asn, lie, Val, Thr or Ser; the amino acid at position 197 is Ala, Gly, lie, Val or Leu; the amino acid at position 198 is Thr, Glu, Ser, Asp, Gly or Ala; the amino acid at position 199 is Pro, Lys or Arg; the amino acid at position 200 is Asn, Ser, Thr, Gln, Ala or Gly; the amino acid at position 201 is Ala, Leu, Glu, lie, Asp or Trp; the amino acid at position 202 is Ser, Asp, Phe, lie, Val, Thr, Glu or Leu; the amino acid at position 203 is His, Pro, Gly, Ala, Thr or Ser; the amino acid at position 204 is lie, Trp, His, Leu, Val, Ala or Gly; the amino acid at position 205 is Ser, Asn, Leu, Val, Thr, Gln or lie; the amino acid at position 206 is Ala, Gly, Asp, Tyr, Glu, Lys or Arg; the amino acid at position 207 is Phe, Val, Ile or Leu; the amino acid at position 208 is Asn, Ser, Pro, Gln, Thr, Val, Ile or Leu; the amino acid at position 210 is Arg, Asp, Glu, Lys, Ser or Tyr; the amino acid at position 211 is lie, Ser, Leu, Val or Thr; the amino acid at position 212 is Val, Ala, lie, Leu, Glu, Gly or Asp; the amino acid at position 214 is Pro, Lys or Arg; the amino acid at position 215 is Ser or Thr; the amino acid at position 217 is Tyr or Phe; the amino acid at position 218 is Arg, Lys, Thr or Ser; the amino acid at position 219 is Val, lie, Leu or Ala; the amino acid at position 220 is Cys, Leu, lie, Val, Thr or Ser; the amino acid at position 221 is Pro or His; the amino acid at position 222 is Leu, Arg, Lys, lie, Val, Thr or Ser; the amino acid at position 224 is Asn, Gln, Thr or Ser; the amino acid at position 225 is Asp, Arg, Glu, Lys, Ser or Thr; the amino acid at position 226 is Thr, Ser, Gln or Asn; the amino acid at position 227 is Asp, Leu, Glu, lie, Val or deleted; the amino acid at position 228 is Thr, Ser or deleted; the amino acid at position 229 is Tyr or deleted; the amino acid at position 230 is Leu, lie, Val or deleted; the amino acid at position 231 is Gly, Ala or deleted; the amino acid at position 232 is lie, Leu, Val or deleted; the amino acid at position 233 is Pro or deleted; the amino acid at position 234 is Ala, Pro, Gly or deleted; the amino acid at position 235 is Asp, lie, Leu, Glu or Val; the amino acid at position 236 is Val, Ser, lie, Leu, Thr, Asp or Glu; the amino acid at position 237 is Ala, Phe or Tyr; the amino acid at position 238 is Ala, Gly, Ser or Thr; the amino acid at position 239 is Val, Ser, lie, Leu, Thr, Ala or Gly; the amino acid at position 240 is Leu, Val or lie; the amino acid at position 243 is Asp or Glu; the amino acid at position 249 is Asn, Gln, Thr or Ser; the amino acid at position 252 is Leu, lie, Val or Met; the amino acid at position 257 is Thr or Ser; the amino acid at position 259 is His, lie, Val or Leu; the amino acid at position 266 is Ala, lie, Leu or Val; the amino acid at position 267 is Cys, Ala or Gly; the amino acid at position 268 is His, Arg, Lys or Tyr; the amino acid at position 272 is Asp or Glu; the amino acid at position 273 is Val, Met, Ile or Leu; the amino acid at position 274 is Val, lie, Leu or Met; the amino acid at position 278 is Gly or Ala; the amino acid at position 279 is Glu, Asp, Gly or Val; the amino acid at position 281 is Leu, lie, Val, Gly or Ala; the amino acid at position 282 is Asn, Leu or lie; the amino acid at position 285 is Asn, Gln, Thr or Ser; the amino acid at position 286 is Lys, Asp, Arg or Glu; the amino acid at position 287 is Leu, Ile or Val; the amino acid at position 290 is Pro, Gln, Asn, Lys or Arg; the amino acid at position 291 is Leu, Ile or Val; the amino acid at position 292 is Lys, Arg, lie, Leu or Val; the amino acid at position 293 is Glu, Asp, Asn or Gln; the amino acid at position 294 is Ser, Asn, Thr, Gln, Arg or Lys; the amino acid at position 295 is Thr or Ser; the amino acid at position 296 is Gln, Asn or His; the amino acid at position 297 is Leu, lie, Val or Met; the amino acid at position 300 is Ser or Thr; the amino acid at position 301 is Glu, Asp, Gly or Ala; the amino acid at position 302 is Ser, Pro, Thr, Gly or Ala; the amino acid at position 304 is Lys, Arg, Gln or Asn; the amino acid at position 313 is Val, Leu or lie; the amino acid at position 314 is His, Glu, Asn, Asp or Gln; the amino acid at position 315 is Ala, Cys, Gly, Thr or Ser; the amino acid at position 316 is Ala, lie, Leu or Val; the amino acid at position 317 is Met, Leu, Val or lie; the amino acid at position 319 is Met, Leu, Val or lie; the amino acid at position 320 is Val, lie, Leu, Ala or Gly; the amino acid at position 321 is Arg, Lys or Pro; the amino acid at position 322 is lie, Leu, Val or Phe; the amino acid at position 323 is Gly, lie, Leu or Val; the amino acid at position 324 is Leu, lie, Val, Thr or Ser; the amino acid at position 336 is Ser, Thr, Gln or Asn; the amino acid at position 339 is Asn, Lys, Gln or Arg; the amino acid at position 350 is Arg, Lys, Asn or Gln; the amino acid at position 351 is Glu or Asp; the amino acid at position 353 is Lys or Arg; the amino acid at position 354 is Gln, Asn, Lys or Arg; the amino acid at position 355 is Phe, lie, Leu or Leu; the amino acid at position 356 is Lys or Arg; the amino acid at position 360 is lie, Val, Leu, Gly or Ala; the amino acid at position 363 is Gln, Ala, Cys, Glu, Phe, Gly, His, Lys, Leu, Asn, Arg, Ser, Thr, Val or Trp; the amino acid at position 364 is lie, Ala, Cys, Glu, Phe, His, Lys, Leu, Met, Asn, Gln, Ser, Thr, Val, Trp or Tyr; the amino acid at position 365 is Leu, Ala, Glu, Phe, Gly, His, lie, Lys, Met, Asn, Arg, Val, Trp or Tyr; the amino acid at position 366 is Gly, Ala, Cys, Phe, His, lie, Lys, Leu, Met, Asn, Ser, Thr or Val; the amino acid at position 367 is Ser, Ala, Cys, Asp, Glu, Phe, Gly, His, lie, Leu, Met, Asn, Pro, Gln, Arg, Thr, Val or Trp; the amino acid at position 368 is Tyr, Ala, Cys, Asp, Glu, Phe, Gly, His, lie, Lys, Leu, Met, Asn, Pro, Gln, Arg, Ser, Thr, Val or Trp; the amino acid at position 369 is Leu, Ala, Cys, Asp, Phe, Gly, lie, Met, Thr or Val; the amino acid at position 370 is Leu, Ala, Cys, Asp, Glu, Phe, Gly, His, lie, Lys, Met, Gln, Arg, Ser, Thr, Val, Trp or Tyr; the amino acid at position 371 is Gln, Ala, Cys, Asp, Glu, Phe, Gly, lie, Lys, Leu, Asn, Arg, Ser, Thr, Val or Trp; the amino acid at position 372 is Gln, Ala, Cys, Asp, Phe, Gly, His, lie, Leu, Asn, Arg, Ser, Val or Tyr; the amino acid at position 373 is Asn, Ala, Cys, Asp, Phe, Gly, His, lie, Lys, Gln, Ser, Thr, Val or Trp; the amino acid at position 374 is Arg or Lys; the amino acid at position 376 is Phe, lie, Val or Leu; the amino acid at position 378 is Glu or Asp; the amino acid at position 381 is Leu, Ile or Val; the amino acid at position 388 is Ala, Thr, Gly or Ser; the amino acid at position 395 is Arg or Lys; the amino acid at position 396 is Glu, Gln, Asp, Asn, Ala or Gly; the amino acid at position 399 is Asp, Gln, Glu or Asn; the amino acid at position 400 is Asn, Thr, Ser, Glu, Gln or Asp; the amino acid at position 401 is Thr, Ser, Gly or Ala; the amino acid at position 402 is Phe, lie, Val or Leu; the amino acid at position 406 is Asp or Glu; the amino acid at position 408 is Leu, lie, Val or Met; the amino acid at position 410 is Gly, lie, Val, Ala or Leu; the amino acid at position 414 is Ala, Gly, Asp or Glu; the amino acid at position 416 is Ser, Asn, Thr, Gln, Glu or Asp; the amino acid at position 417 is Ser, Arg, Lys, Thr, Ala or Gly; the amino acid at position 423 is Lys, Arg, Asn or Gln; the amino acid at position 431 is Arg or Lys; the amino acid at position 432 is Gln, Asn, Asp or Glu; the amino acid at position 436 is Arg, Lys, Asp or Glu; the amino acid at position 440 is Asn, Gln, Lys or Arg; the amino acid at position 442 is Leu, Ile or Val; the amino acid at position 447 is Ser, Lys, Thr or Arg; the amino acid at position 448 is Ala, Gly, Thr or Ser; the amino acid at position 451 is Gln, Asn or Met; the amino acid at position 453 is Gly or Ala; the amino acid at position 455 is Ala, Leu, Ile or Val; the amino acid at position 457 is Leu, Ile or Val; the amino acid at position 467 is Val, lie, Leu, Gly or Ala; the amino acid at position 471 is Gly or Ala; the amino acid at position 475 is Ser, Thr, Gln or Asn; the amino acid at position 483 is Gly or Ala; the amino acid at position 493 is Gln, Asn or Gly; the amino acid at position 504 is Val, Leu or lie; the amino acid at position 506 is Asp, Glu or His; the amino acid at position 509 is Asp, Glu, Gln or Asn; the amino acid at position 510 is Ser, Thr, Gly or Ala; the amino acid at position 512 is Glu or Asp; the amino acid at position 515 is Gly, Ala, Thr or Ser; the amino acid at position 516 is Gln, Asn or His; the amino acid at position 517 is lie, Val or Leu; the amino acid at position 519 is Asp, Asn, Glu, Gly or Gln; the amino acid at position 522 is Val, Glu, Pro, lie, Leu or Asp; the amino acid at position 525 is Glu or Asp; the amino acid at position 526 is Leu, lie, Val or Met; the amino acid at position 539 is Val, Leu or lie; the amino acid at position 555 is Val, Leu, Ile or Ala; the amino acid at position 556 is Trp, Phe, Thr or Tyr; the amino acid at position 557 is Arg, Cys, Asp, Gly, His, lie, Lys, Leu, Met, Asn, Pro, Gln, Ser, Thr, Val, Trp or Tyr; the amino acid at position 558 is Ala, Cys, Asp, Phe, Gly, His, lie, Lys, Leu, Asn, Pro, Gln, Arg, Ser, Val, Trp or Tyr; the amino acid at position 559 is Lys, Ala, Cys, Phe, Gly, His, lie, Leu, Asn, Gln, Arg, Ser, Thr, Val or Tyr; the amino acid at position 560 is Cys, Ala, Phe, Gly, lie, Met, Asn, Arg, Ser, Thr or Val; the amino acid at position 561 is Lys, Ala, Cys, Asp, Glu, Phe, Gly, His, lie, Leu, Met, Asn, Arg, Ser, Thr, Val or Tyr; the amino acid at position 562 is Asn, Cys, Asp, Glu, Gly, His, Leu, Met, Arg, Ser, Thr, Val or Tyr; the amino acid at position 563 is Val, Ala, Cys, Asp, Phe, His, lie, Leu, Met, Asn, Gln, Thr or Trp; the amino acid at position 564 is Ala, Cys, Gly, Met, Gln, Ser, Thr, Val, Trp or Tyr; the amino acid at position 571 is Ser, Thr or Cys; the amino acid at position 575 is Val, Leu, lie, Asp or Glu; the amino acid at position 577 is Met, Leu, Val or lie; the amino acid at position 579 is Glu, Asp, Asn or Gln; the amino acid at position 583 is Asp or Glu; the amino acid at position 589 is Met, lie, Val or Leu; the amino acid at position 590 is Met, lie, Val or Leu; the amino acid at position 593 is Met, Leu, Val or lie; the amino acid at position 595 is Arg, Lys, Asn or Gln; the amino acid at position 596 is Ser or Thr; the amino acid at position 597 is Gln, Asn or His; the amino acid at position 607 is Ala, Gly, lie, Leu or Val; the amino acid at position 608 is Asp, Glu, Gln or Asn; the amino acid at position 612 is Tyr, His or Phe; the amino acid at position 617 is Thr, Ser, Leu, Val or lie; the amino acid at position 618 is Gln, Asn or His; the amino acid at position 625 is Arg, Lys, Thr or Ser; the amino acid at position 626 is Met, Leu, Val or lie; the amino acid at position 628 is Leu, Val or lie; the amino acid at position 633 is lie, Leu, Val or Met; the amino acid at position 634 is Leu, lie, Val or Met; the amino acid at position 642 is Arg, Lys or Met; the amino acid at position 646 is Leu, Ala, Cys, Gly, lie, Met, Asn, Gln, Ser, Thr or Val; the amino acid at position 647 is Leu, Asp, Gly, Met, Asn, Gln or Thr; the amino acid at position 648 is Met, Ala, Cys, Asp, Glu, Phe, Gly, His, Lys, Leu, Asn, Pro, Gln, Arg, Ser, Thr, Val, Trp or Tyr; the amino acid at position 649 is Pro, Ala, Cys, Asp, Glu, Phe, Gly, His, Lys, Met, Asn, Gln, Arg, Ser, Thr, Trp or Tyr; the amino acid at position 650 is Thr, Ala, Cys, Asp, Phe, Gly, His, lie, Lys, Leu, Met, Pro, Gln, Arg, Ser, Val or Tyr; the amino acid at position 651 is Glu, Ala, Cys, Asp, Gly, His, lie, Leu, Met, Asn, Pro, Gln, Arg, Ser, Thr, Val or Tyr; the amino acid at position 652 is Leu, Cys, Phe, lie, Lys, Met, Pro, Arg, Ser, Thr or Val; the amino acid at position 653 is Thr, Cys, Asp, Glu, Phe, Gly, His, lie, Lys, Leu, Pro, Arg, Ser, Val or Trp; the amino acid at position 654 is Thr, Ala, Cys, Phe, lie, Lys, Leu, Met, Pro, Arg, Ser, Val, Trp or Tyr; the amino acid at position 655 is Trp, Phe or Tyr; the amino acid at position 658 is Gly, Lys, Ala or Arg; the amino acid at position 663 is Gly or Ala; the amino acid at position 664 is Asp, Glu, Gln or Asn; the amino acid at position 668 is Ala, Gly, Ser or Thr; the amino acid at position 669 is Gln, Asn or His; the amino acid at position 671 is Asn, Gln, Thr or Ser the amino acid at position 675 is lie, Val, lie, Thr or Ser; the amino acid at position 678 is Met, lie, Ala, Leu, Ser or Thr; the amino acid at position 682 is Pro, Asn or Gln; the amino acid at position 683 is Ser, Thr or Pro; the amino acid at position 685 is Asp, Glu, Asp or Asn; the amino acid at position 694 is Asp, Glu, Ala or Gly; the amino acid at position 697 is Asn, Gln, Thr or Ser; the amino acid at position 704 is Glu, Asp, Ala or Gly; the amino acid at position 714 is Ala or Gly; the amino acid at position 721 is Ser, Thr or Phe; the amino acid at position 722 is Ser, Thr, Gln or Asn; the amino acid at position 724 is Ser or Thr; the amino acid at position 734 is His, Asn or Gln; the amino acid at position 736 is Val, Leu, Ile or Ala; the amino acid at position 737 is Lys, Arg, Asn or Gln; the amino acid at position 739 is Ala, Gly, Thr or Ser; the amino acid at position 740 is Ser, Thr or Met; the amino acid at position 741 is Gly, Ala, Gln or Asn; the amino acid at position 742 is lie, Leu, Val, Ala or Gly; the amino acid at position 743 is Gly or deleted; the amino acid at position 745 is Gly, Ala, Glu or Asp; the amino acid at position 751 is Thr, Ser, Gly or Ala; the amino acid at position 753 is Gln, Asn, Lys or Arg; the amino acid at position 754 is Thr or Ser; the amino acid at position 756 is Thr, Ser, Leu, Val or lie; the amino acid at position 757 is Val, Leu or lie; the amino acid at position 766 is lie, Leu or Val; the amino acid at position 771 is Arg, Ala, Asp, Glu, Phe, Gly, His, lie, Lys, Leu, Asn, Ser, Thr, Val, Trp or Tyr; the amino acid at position 772 is Arg, Ala, Cys, Asp, Glu, Phe, Gly, His, lie, Lys, Leu, Met, Pro, Gln, Ser, Thr, Val, Trp or Tyr; the amino acid at position 773 is Asp, Ala, Glu, Phe, Gly, His, lie, Lys, Leu, Met, Asn, Gln, Arg, Ser, Thr, Val, Trp or Tyr; the amino acid at position 774 is Gln, Ala, Asp, Gly, His, lie, Lys, Leu, Met, Asn, Pro, Arg, Ser, Thr, Val, Trp or Tyr; the amino acid at position 775 is Val, Ala, Cys, Asp, Glu, Gly, His, lie, Asn, Pro, Gln, Arg, Ser, Thr or Tyr; the amino acid at position 776 is Leu, Ala, Cys, Asp, Glu, Phe, Gly, His, lie, Lys, Asn, Pro, Gln, Arg, Ser, Thr, Val or Tyr; the amino acid at position 777 is Pro, Ala, Cys, Asp, Glu, Phe, Gly, His, Lys, Leu, Met, Asn, Gln, Ser, Thr, Val, Trp or Tyr; the amino acid at position 778 is Phe, Ala, His, lie, Leu, Met, Asn, Gln, Ser, Val, Trp or Tyr; the amino acid at position 779 is Gln, Ala, Cys, Asp, Glu, Gly, His, Lys, Leu, Asn, Pro, Arg, Ser, Thr or Val; the amino acid at position 780 is Ala, Cys, Asn, Pro, Gln or Ser; the amino acid at position 781 is Ala, Cys, Asp, Glu, Phe, Gly, His, lie, Asn, Gln, Arg, Ser, Thr, Val, Trp or Tyr; the amino acid at position 782 is Ala, Cys, Asp, Glu, Phe, Gly, His, lie, Lys, Met, Pro, Gln, Arg, Ser, Thr, Val, Trp or Tyr; the amino acid at position 783 is Pro, Ala, Cys, Asp, Glu, Gly, His, Asn, Gln, Arg, Ser, Thr or Val; the amino acid at position 784 is Leu, Ala, Glu, Phe, His, lie, Lys, Met, Asn, Pro, Gln, Ser, Thr, Val or Trp; the amino acid at position 785 is Asn, Ala, Cys, Glu, Phe, Gly, His, lie, Lys, Leu, Met, Gln, Arg, Ser, Thr, Val, Trp or Tyr; the amino acid at position 786 is Tyr, Phe, lie, Leu or Trp; the amino acid at position 787 is His, Asn or Gln; the amino acid at position 788 is Tyr or Met; the amino acid at position 789 is Ala, Lys or Arg; the amino acid at position 790 is Tyr or Thr; the amino acid at position 791 is Arg, Lys, Gly or Ala; the amino acid at position 792 is Leu, lie, Val, Thr or Ser; the amino acid at position 796 is Asp or Glu; the amino acid at position 797 is Ser, Thr or Ala the amino acid at position 802 is Glu, Lys, Asp, Asn or Gln; the amino acid at position 806 is Gln, Asp, Glu, Asn or His; the amino acid at position 810 is Lys, Arg or Thr; the amino acid at position 819 is Arg, Lys or His; the amino acid at position 829 is Lys, Ser, Ala or Pro; the amino acid at position 832 is Ala, Lys, Arg, Asp or Glu; the amino acid at position 833 is Gly, Ala, Asp or Glu; the amino acid at position 842 is Leu, lie, Val or Pro; the amino acid at position 847 is Gln, Asn, Asp or Glu; the amino acid at position 848 is lie, Leu or Val; the amino acid at position 849 is Val, Leu, lie, Gly or Ala; the amino acid at position 855 is Thr, Ser or Met; the amino acid at position 860 is lie, Leu or Val; and the amino acid at position 864 is His, Asn or Gln.

[0138] In some embodiments the nucleic acid molecule encoding the PtIP-83 polypeptide is derived from a fern species in the Division Pteridophyta. In some embodiments the PtIP-83 polypeptide is derived from a fern species in the Class Psilotopsida. In some embodiments the PtIP-83 polypeptide is derived from a fern species in the Class Psilotopsida, Order Psilotales. In some embodiments the PtIP-83 polypeptide is derived from a fern species in the Class Psilotopsida, Order Ophioglossales. In some embodiments the PtIP-83 polypeptide is derived from a fern species in the Class Psilotopsida, Order Ophioglossales, Family Psilotaceae. In some embodiments the PtIP-83 polypeptide is derived from a fern species in the Class Psilotopsida, Order Ophioglossales Family Ophioglossaceae. In some embodiments the PtIP-83 polypeptide is derived from a fern species in the Genus Ophioglossum L., Botrychium, Botrypus, Helminthostachys, Ophioderma, Cheiroglossa, Sceptridium or Mankyua. In some embodiments the PtIP-83 polypeptide is derived from a species in the Class Polypodiopsida/Pteridopsida. In some embodiments the PtIP-83 polypeptide is derived from a fern species in the Order Osmundales (royal ferns); Family Osmundaceae. In some embodiments the PtIP-83 polypeptide is derived from a fern species in the Order Hymenophyllales; Family Hymenophyllaceae. In some embodiments the PtIP-83 polypeptide is derived from a fern species in the Order Gleicheniales; Family Gleicheniaceae, Family Dipteridaceae or Family Matoniaceae. In some embodiments the PtIP-83 polypeptide is derived from a fern species in the Order Schizaeales; Family Lygodiaceae, Family Anemiaceae or Family Schizaeaceae. In some embodiments the PtIP-83 polypeptide is derived from a fern species in the Order Schizaeales; Family Schizaeaceae, Genus Lygodium selected from but not limited to Lygodium articulatum, Lygodium circinatum, Lygodium conforme, Lygodium cubense, Lygodium digitatum, Lygodium flexuosum, Lygodium heterodoxum, Lygodium japonicum, Lygodium kerstenii, Lygodium lanceolatum, Lygodium longifolium, Lygodium merrilii, Lygodium micans, Lygodium microphyllum, Lygodium microstachyum, Lygodium oligostachyum, Lygodium palmatum, Lygodium polystachyum, Lygodium radiatum, Lygodium reticulatum, Lygodium salicifolium, Lygodium scandens, Lygodium smithianum, Lygodium subareolatum, Lygodium trifurcatum, Lygodium venustum, Lygodium versteeghii, Lygodium volubile, and Lygodium yunnanense.

[0139] In some embodiments the PtIP-83 polypeptide is derived from a fern species in the Order Salviniales; Family Marsileaceae or Family Salviniaceae. In some embodiments the PtIP-83 polypeptide is derived from a fern species in the Order Cyatheales; Family Thyrsopteridaceae, Family Loxsomataceae, Family Culcitaceae, Family Plagiogyriaceae, Family Cibotiaceae, Family Cyatheaceae, Family Dicksoniaceae or Family Metaxyaceae.

[0140] In some embodiments the PtIP-83 polypeptide is derived from a fern species in the Order Polypodiales; Family Lindsaeaceae, Family Saccolomataceae, Family Cystodiaceae, Family Dennstaedtiaceae, Family Pteridaceae, Family Aspleniaceae, Family Thelypteridaceae, Family Woodsiaceae, Family Onocleaceae, Family Blechnaceae, Family Dryopteridaceae, Family Lomariopsidaceae, Family Tectariaceae, Family Oleandraceae, Family Davalliaceae or Family Polypodiaceae.

[0141] In some embodiments the PtIP-83 polypeptide is derived from a fern species in the Order Polypodiales, Family Pteridaceae, Genus Adiantaceae selected from but not limited to Adiantum aethiopicum, Adiantum aleuticum, Adiantum bonatianum, Adiantum cajennense, Adiantum capillus-junonis, Adiantum capillus-veneris, Adiantum caudatum, Adiantum chienii, Adiantum chilense, Adiantum cuneatum, Adiantum cunninghamii, Adiantum davidii, Adiantum diaphanum, Adiantum edentulum, Adiantum edgeworthii, Adiantum excisum, Adiantum fengianum, Adiantum fimbriatum, Adiantum flabellulatum, Adiantum formosanum, Adiantum formosum, Adiantum fulvum, Adiantum gravesii, Adiantum hispidulum, Adiantum induratum, Adiantum jordanii, Adiantum juxtapositum, Adiantum latifolium, Adiantum leveillei, Adiantum lianxianense, Adiantum malesianum, Adiantum mariesii, Adiantum monochlamys, Adiantum myriosorum, Adiantum obliquum, Adiantum ogasawarense, Adiantum pedatum, Adiantum pentadactylon, Adiantum peruvianum, Adiantum philippense, Adiantum princeps, Adiantum pubescens, Adiantum raddianum, Adiantum reniforme, Adiantum roborowskii, Adiantum serratodentatum, Adiantum sinicum, Adiantum soboliferum, Adiantum subcordatum, Adiantum tenerum, Adiantum terminatum, Adiantum tetraphyllum, Adiantum trapeziforme, Adiantum venustum, Adiantum viridescens, and Adiantum viridimontanum.

[0142] In some embodiments the PtIP-83 polypeptide is derived from a fern species in the Order Polypodiales, Family Aspleniaceae, Genus Asplenium.

[0143] In some embodiments the PtIP-83 polypeptide is derived from a fern species in the Order Polypodiales, Family Aspleniaceae, Genus Aspleniuml selected from but not limited to Asplenium adiantum, Asplenium adulterinum, Asplenium aequibasis, Asplenium aethiopicum, Asplenium africanum, Asplenium x alternifolium, Asplenium angustum, Asplenium antiquum, Asplenium ascensionis, Asplenium attenuatum, Asplenium aureum, Asplenium auritum, Asplenium australasicum, Asplenium azoricum, Asplenium bifrons, Asplenium billottii, Asplenium bipinnatifidum, Asplenium brachycarpum, Asplenium bradleyi, Asplenium bulbiferum, Asplenium caudatum, Asplenium ceterach, Asplenium compressum, Asplenium congestum, Asplenium corderoanum, Asplenium crinicaule, Asplenium cristatum, Asplenium cuneifolium, Asplenium cymbifolium, Asplenium daghestanicum, Asplenium dalhousiae, Asplenium dareoides, Asplenium daucifolium, Asplenium difforme, Asplenium fissum, Asplenium dimorphum, Asplenium divaricatum, Asplenium dregeanum, Asplenium x ebenoides, Asplenium ecuadorense, Asplenium feei Kunze, Asplenium fissum, Asplenium flabellifolium, Asplenium flaccidum, Asplenium fontanum, Asplenium forisiense, Asplenium formosum, Asplenium gemmiferum, Asplenium x germanicum, Asplenium gueinzii, Asplenium goudeyi, Asplenium hemionitis, Asplenium hermannii-christii, Asplenium hookerianum, Asplenium hybridum, Asplenium incisum, Asplenium x jacksonii, Asplenium x kenzoi, Asplenium laciniatum, Asplenium lamprophyllum, Asplenium laserpitiifolium, Asplenium lepidum, Asplenium listeri, Asplenium longissimum, Asplenium lucidum, Asplenium lunulatum, Asplenium lyallii, Asplenium macedonicum, Asplenium majoricum, Asplenium marinum, Asplenium x microdon, Asplenium milnei Carruth, Asplenium montanum, Asplenium musifolium, Asplenium nidus, Asplenium normale, Asplenium obliquum, Asplenium oblongifolium, Asplenium obovatum, Asplenium obtusatum, Asplenium oligolepidum, Asplenium oligophlebium, Asplenium onopteris, Asplenium pacificum, Asplenium paleaceum, Asplenium palmeri, Asplenium petrarchae, Asplenium pinnatifidum, Asplenium planicaule, Asplenium platybasis, Asplenium platyneuron, Asplenium polyodon, Asplenium praemorsum, Asplenium prolongatum, Asplenium pteridoides, Asplenium resiliens, Asplenium rhizophyllum, Asplenium richardii, Asplenium ruprechtii, Asplenium ruta-muraria, Asplenium rustifolium, Asplenium sagittatum, Asplenium sandersonii, Asplenium x sarniense, Asplenium schizotrichum, Asplenium schweinfurthii, Asplenium scleroprium, Asplenium scolopendrium (syn. Phyllitis scolopendrium), Asplenium seelosii, Asplenium septentrionale, Asplenium septentrionale x trichomanes, Asplenium serra, Asplenium serratum, Asplenium sessilifolium, Asplenium shuttleworthianum, Asplenium simplicifrons, Asplenium splendens, Asplenium surrogatum, Asplenium tenerum, Asplenium terrestre, Asplenium theciferum, Asplenium thunbergii, Asplenium trichomanes, Asplenium tutwilerae, Asplenium vespertinum, Asplenium vieillardii, Asplenium virens, Asplenium viride, Asplenium vittiforme, and Asplenium viviparum.

[0144] In some embodiments the PtIP-83 polypeptide is derived from a fern species in the Order Polypodiales, Family Blechnaceae, Genus Blecnum.

[0145] In some embodiments the PtIP-83 polypeptide is derived from a fern species in the Order Polypodiales, Family Dryopteridaceae Genus Acrophorus, Genus Acrorumohra, Genus Anapausia, Genus Arachniodes, Genus Bolbitis, Genus Ctenitis, Genus Cyclodium, Genus Cyrtogonellum, Genus Cyrtomidictyum, Genus Cyrtomium, Genus Diacalpe, Genus Didymochlaena, Genus Dryopsis, Genus Dryopteris, Genus Elaphoglossum, Genus Hypodematium, Genus Lastreopsis, Genus Leptorumohra, Genus Leucostegia, Genus Lithostegia, Genus Lomagramma, Genus Maxonia, Genus Megalastrum, Genus Olfersia, Genus Peranema, Genus Phanerophlebia, Genus Phanerophlebiopsis, Genus Polybotrya, Genus Polystichopsis, Genus Polystichum, Genus Rumohra, Genus Sorolepidium, Genus Stigmatopteris or Genus Teratophyllum.

[0146] In some embodiments the PtIP-83 polypeptide is derived from a fern species in the Order Polypodiales, Family Dryopteridaceae, Genus Polystichum. In some embodiments the nucleic acid molecule encoding the PtIP-83 polypeptide is derived from a fern species in the Order Polypodiales, Family Dryopteridaceae, Genus Polystichum selected from but not limited to Polystichum acanthophyllum, Polystichum acrostichoides, Polystichum aculeatum, Polystichum acutidens, Polystichum acutipinnulum, Polystichum alcicorne, Polystichum aleuticum, Polystichum andersonii, Polystichum atkinsonii, Polystichum australiense Polystichum bakerianum, Polystichum biaristatum, Polystichum bomiense, Polystichum bonseyi, Polystichum brachypterum, Polystichum braunii, Polystichum brachypterum, Polystichum calderonense, Polystichum californicum, Polystichum capillipes, Polystichum castaneum, Polystichum chilense, Polystichum christii Ching, Polystichum chunii Ching, Polystichum craspedosorum, Polystichum cyclolobum, Polystichum cystostegia, Polystichum deltodon, Polystichum dielsii, Polystichum discretum, Polystichum drepanum, Polystichum dudleyi, Polystichum duthiei, Polystichum echinatum, Polystichum erosum, Polystichum excellens, Polystichum eximium, Polystichum falcatipinnum, Polystichum falcinellum, Polystichum fallax, Polystichum formosanum, Polystichum gongboense, Polystichum grandifrons, Polystichum gymnocarpium, Polystichum haleakalense, Polystichum hancockii, Polystichum hecatopteron, Polystichum herbaceum, Polystichum imbricans, Polystichum incongruum, Polystichum kruckebergii, Polystichum kwakiutlii, Polystichum lachenense, Polystichum lanceolatum, Polystichum lemmonii, Polystichum lentum, Polystichum lonchitis, Polystichum longidens, Polystichum longipaleatum, Polystichum longipes, Polystichum luctuosum, Polystichum macleae, Polystichum macrochlaenum, Polystichum makinoi, Polystichum martini, Polystichum mayebarae, Polystichum mediocre, Polystichum medogense, Polystichum microchlamys, Polystichum mohrioides, Polystichum mollissimum, Polystichum monticola, Polystichum moorei, Polystichum morii, Polystichum moupinense, Polystichum muricatum, Polystichum nakenense, Polystichum neolobatum, Polystichum nepalense, Polystichum ningshenense, Polystichum obliquum, Polystichum omeiense, Polystichum ordinatum, Polystichum orientalitibeticum, Polystichum paramoupinense, Polystichum parvipinnulum, Polystichum piceopaleaceum, Polystichum polyblepharum, Polystichum prescottianum, Polystichum prionolepis, Polystichum proliferum, Polystichum pseudocastaneum, Polystichum pseudomakinoi, Polystichum punctiferum, Polystichum pungens, Polystichum qamdoense, Polystichum retrosopaleaceum, Polystichum rhombiforme, Polystichum rhomboidea, Polystichum richardii, Polystichum rigens, Polystichum rotundilobum, Polystichum scopulinum, Polystichum semifertile, Polystichum setiferum, Polystichum setigerum, Polystichum shensiense, Polystichum silvaticum, Polystichum simplicipinnum, Polystichum sinense, Polystichum squarrosum, Polystichum stenophyllum, Polystichum stimulans, Polystichum submite, Polystichum tacticopterum, Polystichum thomsoni, Polystichum tibeticum, Polystichum transvaalense, Polystichum tripteron, Polystichum tsus-simense, Polystichum vestitum, Polystichum wattii, Polystichum whiteleggei, Polystichum xiphophyllum, Polystichum yadongense, and Polystichum yunnanense.

[0147] In some embodiments the PtIP-83 polypeptide is derived from a fern species in the Order Polypodiales, Family Dryopteridaceae, Genus Rumohra. In some embodiments the nucleic acid molecule encoding the PtIP-83 polypeptide is derived from a fern species in the Order Polypodiales, Family Dryopteridaceae, Genus Rumohra selected from but not limited to Rumohra adiantiformis, Rumohra aristata, Rumohra bartonae, Rumohra berteroana, Rumohra capuronii, Rumohra glandulosa, Rumohra humbertii, Rumohra linearisquamosa, Rumohra lokohensis, Rumohra madagascarica, and Rumohra quadrangularis.

[0148] In some embodiments the PtIP-83 polypeptide is derived from a fern species in the Order Polypodiales, Family Lomariopsidaceae, Genus Nephrolepis.

[0149] In some embodiments the PtIP-83 polypeptide is derived from a fern species in the Order Polypodiales, Family Polypodiaceae, Genus Campyloneurum, Genus Drynaria, Genus Lepisorus, Genus Microgramma, Genus Microsorum, Genus Neurodium, Genus Niphidium, Genus Pecluma M.G., Genus Phlebodium, Genus Phymatosorus, Genus Platycerium, Genus Pleopeltis, Genus Polypodium.

[0150] In some embodiments the PtIP-83 polypeptide is derived from a fern species in the Order Polypodiales, Family Polypodiaceae, Genus Microsorum.

[0151] In some embodiments the PtIP-83 polypeptide is derived from a fern species in the Order Polypodiales, Family Polypodiaceae, Genus Microsorum selected from but not limited to Microsorum alatum, Microsorum angustifolium, Microsorum aurantiacum, Microsorum australiense, Microsorum baithoense, Microsorum basicordatum, Microsorum biseriatum, Microsorum brassii, Microsorum buergerianum, Microsorum chapaense, Microsorum cinctum, Microsorum commutatum, Microsorum congregatifolium, Microsorum cuneatum, Microsorum cuspidatum, Microsorum dengii, Microsorum egregium, Microsorum emeiensis, Microsorum ensatum, Microsorum ensiforme, Microsorum excelsum, Microsorum fortunei, Microsorum griseorhizoma, Microsorum grossum, Microsorum hemionitideum, Microsorum henryi, Microsorum heterocarpum, Microsorum heterolobum, Microsorum howense, Microsorum insigne, Microsorum intermedium, Microsorum kongtingense, Microsorum krayanense, Microsorum lanceolatum, Microsorum lancifolium, Microsorum lastii, Microsorum latilobatum, Microsorum leandrianum, Microsorum lineare, Microsorum linguiforme, Microsorum longissimum, Microsorum longshengense, Microsorum maculosum, Microsorum maximum, Microsorum membranaceum, Microsorum membranifolium, Microsorum microsorioides, Microsorum minor, Microsorum monstrosum, Microsorum muliense, Microsorum mutense, Microsorum nanchuanense, Microsorum ningpoense, Microsorum normale, Microsorum novae-zealandiae, Microsorum ovalifolium, Microsorum ovatum, Microsorum palmatopedatum, Microsorum pappei, Microsorum papuanum, Microsorum parksii, Microsorum pentaphyllum, Microsorum piliferum, Microsorum pitcairnense, Microsorum powellii, Microsorum pteropodum, Microsorum pteropus, Microsorum punctatum, Microsorum pustulatum, Microsorum rampans, Microsorum revolutum, Microsorum rubidum, Microsorum samarense, Microsorum sapaense, Microsorum sarawakense, Microsorum scandens, Microsorum scolopendria, Microsorum sibomense, Microsorum sinense, Microsorum sopuense, Microsorum spectrum, Microsorum steerei, Microsorum subhemionitideum, Microsorum submarginale, Microsorum subnudum, Microsorum superficiale, Microsorum takhtajanii, Microsorum tenuipes, Microsorum tibeticum, Microsorum triglossum, Microsorum truncatum, Microsorum tsaii, Microsorum varians, Microsorum venosum, Microsorum vieillardii, Microsorum x inaequibasis, Microsorum yiliangensis, and Microsorum zippelii.

[0152] In some embodiments the PtIP-83 polypeptide is derived from a fern species in the Order Polypodiales, Family Polypodiaceae, Genus Polypodium L.

[0153] In some embodiments the PtIP-83 polypeptide is derived from a fern species in the Order Polypodiales, Family Polypodiaceae, Genus Polypodium L. selected from but not limited to Polypodium absidatum, Polypodium acutifolium, Polypodium adiantiforme, Polypodium aequale, Polypodium affine, Polypodium albidopaleatum, Polypodium alcicorne, Polypodium alfarii, Polypodium alfredii, Polypodium alfredii var. curtii, Polypodium allosuroides, Polypodium alsophilicola, Polypodium amamianum, Polypodium amoenum, Polypodium amorphum, Polypodium anetioides, Polypodium anfractuosum, Polypodium anguinum, Polypodium angustifolium f. remotifolia, Polypodium angustifolium var. amphostenon, Polypodium angustifolium var. heterolepis, Polypodium angustifolium var. monstrosa, Polypodium angustipaleatum, Polypodium angustissimum, Polypodium anisomeron var. pectinatum, Polypodium antioquianum, Polypodium aoristisorum, Polypodium apagolepis, Polypodium apicidens, Polypodium apiculatum, Polypodium apoense, Polypodium appalachianum, Polypodium appressum, Polypodium arenarium, Polypodium argentinum, Polypodium argutum, Polypodium armatum, Polypodium aromaticum, Polypodium aspersum, Polypodium assurgens, Polypodium atrum, Polypodium auriculatum, Polypodium balaonense, Polypodium balliviani, Polypodium bamleri, Polypodium bangii, Polypodium bartlettii, Polypodium basale, Polypodium bernoullii, Polypodium biauritum, Polypodium bifrons, Polypodium blepharodes, Polypodium bolivari, Polypodium bolivianum, Polypodium bolobense, Polypodium bombycinum, Polypodium bombycinum var. insularum, Polypodium bradeorum, Polypodium bryophilum, Polypodium bryopodum, Polypodium buchtienii, Polypodium buesii, Polypodium bulbotrichum, Polypodium caceresii, Polypodium californicum f. brauscombii, Polypodium californicum f. parsonsiae, Polypodium californicum, Polypodium calophlebium, Polypodium calvum, Polypodium camptophyllarium var. abbreviatum, Polypodium capitellatum, Polypodium carpinterae, Polypodium chachapoyense, Polypodium chartaceum, Polypodium chimantense, Polypodium chiricanum, Polypodium choquetangense, Polypodium christensenii, Polypodium christii, Polypodium chrysotrichum, Polypodium ciliolepis, Polypodium cinerascens, Polypodium collinsii, Polypodium colysoides, Polypodium confluens, Polypodium conforme, Polypodium confusum, Polypodium congregatifolium, Polypodium connellii, Polypodium consimile var. bourgaeanum, Polypodium consimile var. minor, Polypodium conterminans, Polypodium contiguum, Polypodium cookii, Polypodium coriaceum, Polypodium coronans, Polypodium costaricense, Polypodium costatum, Polypodium crassifolium f. angustissimum, Polypodium crassifolium var. longipes, Polypodium crassulum, Polypodium craterisorum, Polypodium cryptum, Polypodium crystalloneuron, Polypodium cucullatum var. planum, Polypodium cuencanum, Polypodium cumingianum, Polypodium cupreolepis, Polypodium curranii, Polypodium curvans, Polypodium cyathicola, Polypodium cyathisorum, Polypodium cyclocolpon, Polypodium daguense, Polypodium damunense, Polypodium dareiformioides, Polypodium dasypleura, Polypodium decipiens, Polypodium decorum, Polypodium delicatulum, Polypodium deltoideum, Polypodium demeraranum, Polypodium denticulatum, Polypodium diaphanum, Polypodium dilatatum, Polypodium dispersum, Polypodium dissectum, Polypodium dissimulans, Polypodium dolichosorum, Polypodium dolorense, Polypodium donnell-smithii, Polypodium drymoglossoides, Polypodium ebeninum, Polypodium eggersii, Polypodium elmeri, Polypodium elongatum, Polypodium enterosoroides, Polypodium erubescens, Polypodium erythrolepis, Polypodium erythrotrichum, Polypodium eurybasis, Polypodium eurybasis var. villosum, Polypodium exornans, Polypodium falcoideum, Polypodium fallacissimum, Polypodium farinosum, Polypodium faucium, Polypodium feei, Polypodium ferrugineum, Polypodium feuillei, Polypodium firmulum, Polypodium firmum, Polypodium flaccidum, Polypodium flagellare, Polypodium flexuosum, Polypodium flexuosum var. ekmanii, Polypodium forbesii, Polypodium formosanum, Polypodium fraxinifolium subsp. articulatum, Polypodium fraxinifolium subsp. luridum, Polypodium fructuosum, Polypodium fucoides, Polypodium fulvescens, Polypodium galeottii, Polypodium glaucum, Polypodium glycyrrhiza, Polypodium gracillimum, Polypodium gramineum, Polypodium grandifolium, Polypodium gratum, Polypodium graveolens, Polypodium griseo-nigrum, Polypodium griseum, Polypodium guttatum, Polypodium haalilioanum, Polypodium hammatisorum, Polypodium hancockii, Polypodium haplophlebicum, Polypodium harrisii, Polypodium hastatum var. simplex, Polypodium hawaiiense, Polypodium heanophyllum, Polypodium helleri, Polypodium hemionitidium, Polypodium henryi, Polypodium herzogii, Polypodium hesperium, Polypodium hessii, Polypodium hombersleyi, Polypodium hostmannii, Polypodium humile, Polypodium hyalinum, Polypodium iboense, Polypodium induens var. subdentatum, Polypodium insidiosum, Polypodium insigne, Polypodium intermedium subsp. masafueranum var. obtuseserratum, Polypodium intramarginale, Polypodium involutum, Polypodium itatiayense, Polypodium javanicum, Polypodium juglandifolium, Polypodium kaniense, Polypodium knowltoniorum, Polypodium kyimbilense, Polypodium I'herminieri var. costaricense, Polypodium lachniferum f. incurvata, Polypodium lachniferum var. glabrescens, Polypodium lachnopus, Polypodium lanceolatum var. complanatum, Polypodium lanceolatum var. trichophorum, Polypodium latevagans, Polypodium laxifrons, Polypodium laxifrons var. lividum, Polypodium lehmannianum, Polypodium leiorhizum, Polypodium leptopodon, Polypodium leuconeuron var. angustifolia, Polypodium leuconeuron var. latifolium, Polypodium leucosticta, Polypodium limulum, Polypodium lindigii, Polypodium lineatum, Polypodium lomarioides, Polypodium longifrons, Polypodium loretense, Polypodium loriceum var. umbraticum, Polypodium loriforme, Polypodium loxogramme f. gigas, Polypodium ludens, Polypodium luzonicum, Polypodium lycopodioides f. obtusum, Polypodium lycopodioides L., Polypodium macrolepis, Polypodium macrophyllum, Polypodium macrosorum, Polypodium macrosphaerum, Polypodium maculosum, Polypodium madrense, Polypodium manmeiense, Polypodium margaritiferum, Polypodium maritimum, Polypodium martensii, Polypodium mayoris, Polypodium megalolepis, Polypodium melanotrichum, Polypodium menisciifolium var. pubescens, Polypodium meniscioides, Polypodium merrillii, Polypodium mettenii, Polypodium mexiae, Polypodium microsorum, Polypodium militare, Polypodium minimum, Polypodium minusculum, Polypodium mixtum, Polypodium mollendense, Polypodium mollissimum, Polypodium moniliforme var. minus, Polypodium monoides, Polypodium monticola, Polypodium montigenum, Polypodium moritzianum, Polypodium moultonii, Polypodium multicaudatum, Polypodium multilineatum, Polypodium multisorum, Polypodium munchii, Polypodium muscoides, Polypodium myriolepis, Polypodium myriophyllum, Polypodium myriotrichum, Polypodium nematorhizon, Polypodium nemorale, Polypodium nesioticum, Polypodium nigrescentium, Polypodium nigripes, Polypodium nigrocinctum, Polypodium nimbatum, Polypodium nitidissimum, Polypodium nitidissimum var. latior, Polypodium nubrigenum, Polypodium oligolepis, Polypodium oligosorum, Polypodium oligosorum, Polypodium olivaceum, Polypodium olivaceum var. elatum, Polypodium oodes, Polypodium oosphaerum, Polypodium oreophilum, Polypodium ornatissimum, Polypodium ornatum, Polypodium ovatum, Polypodium oxylobum, Polypodium oxypholis, Polypodium pakkaense, Polypodium pallidum, Polypodium palmatopedatum, Polypodium palmeri, Polypodium panamense, Polypodium parvum, Polypodium patagonicum, Polypodium paucisorum, Polypodium pavonianum, Polypodium pectinatum var. caliense, Polypodium pectinatum var. hispidum, Polypodium pellucidum, Polypodium pendulum var. boliviense, Polypodium percrassum, Polypodium perpusillum, Polypodium peruvianum var. subgibbosum, Polypodium phyllitidis var. elongatum, Polypodium pichinchense, Polypodium pilosissimum, Polypodium pilosissimum var. glabriusculum, Polypodium pilossimum var. tunguraquensis, Polypodium pityrolepis, Polypodium platyphyllum, Polypodium playfairii, Polypodium plebeium var. cooperi, Polypodium plectolepidioides, Polypodium pleolepis, Polypodium plesiosorum var.i, Polypodium podobasis, Polypodium podocarpum, Polypodium poloense, Polypodium polydatylon, Polypodium polypodioides var. aciculare, Polypodium polypodioides var. michauxianum, Polypodium praetermissum, Polypodium preslianum var. immersum, Polypodium procerum, Polypodium procerum, Polypodium productum, Polypodium productum, Polypodium prolongilobum, Polypodium propinguum, Polypodium proteus, Polypodium pruinatum, Polypodium pseudocapillare, Polypodium pseudofraternum, Polypodium pseudonutans, Polypodium pseudoserratum, Polypodium pulcherrimum, Polypodium pulogense, Polypodium pungens, Polypodium purpusii, Polypodium radicale, Polypodium randallii, Polypodium ratiborii, Polypodium reclinatum, Polypodium recreense, Polypodium repens var. abruptum, Polypodium revolvens, Polypodium rhachipterygium, Polypodium rhomboideum, Polypodium rigens, Polypodium robustum, Polypodium roraimense, Polypodium roraimense, Polypodium rosei, Polypodium rosenstockii, Polypodium rubidum, Polypodium rudimentum, Polypodium rusbyi, Polypodium sablanianum, Polypodium sarmentosum, Polypodium saxicola, Polypodium schenckii, Polypodium schlechteri, Polypodium scolopendria, Polypodium scolopendria, Polypodium scolopendrium, Polypodium scouleri, Polypodium scutulatum, Polypodium segregatum, Polypodium semihirsutum, Polypodium semihirsutum var. fuscosetosum, Polypodium senile var. minor, Polypodium sericeolanatum, Polypodium serraeforme, Polypodium serricula, Polypodium sesquipedala, Polypodium sessilifolium, Polypodium setosum var. calvum, Polypodium setulosum, Polypodium shaferi, Polypodium sibomense, Polypodium siccum, Polypodium simacense, Polypodium simulans, Polypodium singeri, Polypodium sinicum, Polypodium sintenisii, Polypodium skutchii, Polypodium sloanei, Polypodium sodiroi, Polypodium sordidulum, Polypodium sordidum, Polypodium sphaeropteroides, Polypodium sphenodes, Polypodium sprucei, Polypodium sprucei var. furcativenosa, Polypodium steirolepis, Polypodium stenobasis, Polypodium stenolepis, Polypodium stenopterum, Polypodium subcapillare, Polypodium subflabelliforme, Polypodium subhemionitidium, Polypodium subinaequale, Polypodium subintegrum, Polypodium subspathulatum, Polypodium subtile, Polypodium subvestitum, Polypodium subviride, Polypodium superficiale var. attenuatum, Polypodium superficiale var. chinensis, Polypodium sursumcurrens, Polypodium tablazianum, Polypodium taenifolium, Polypodium tamandarei, Polypodium tatei, Polypodium tenuiculum var. acrosora, Polypodium tenuiculum var. brasiliense, Polypodium tenuilore, Polypodium tenuinerve, Polypodium tepuiense, Polypodium teresae, Polypodium tetragonum var. incompletum, Polypodium thysanolepis var. bipinnatifidum, Polypodium thyssanolepis, var. thyssanolepis, Polypodium thyssanolepsi, Polypodium tobagense, Polypodium trichophyllum, Polypodium tridactylum, Polypodium tridentatum, Polypodium trifurcatum var. brevipes, Polypodium triglossum, Polypodium truncatulum, Polypodium truncicola var. major, Polypodium truncicola var. minor, Polypodium tuberosum, Polypodium tunguraguae, Polypodium turquinum, Polypodium turrialbae, Polypodium ursipes, Polypodium vagans, Polypodium valdealatum, Polypodium versteegii, Polypodium villagranii, Polypodium virginianum f. cambroideum, Polypodium virginianum f. peraferens, Polypodium vittarioides, Polypodium vulgare, Polypodium vulgare L., Polypodium vulgare subsp. oreophilum, Polypodium vulgare var. acuminatum, Polypodium vulpinum, Polypodium williamsii, Polypodium wobbense, Polypodium x fallacissimum-guttatum, Polypodium xantholepis, Polypodium xiphopteris, Polypodium yarumalense, Polypodium yungense, and Polypodium zosteriforme.

[0154] In some embodiments the PtIP-83 polypeptide is derived from a fern species in the Order Polypodiales, Family Polypodiaceae, Genus Platycerium.

[0155] In some embodiments the PtIP-83 polypeptide is derived from a species in the Division Lycophyta.

[0156] In some embodiments the PtIP-83 polypeptide is derived from a species in the Class Isoetopsida or Class Lycopodiopsida.

[0157] In some embodiments the PtIP-83 polypeptide is derived from a species in the Class Isoetopsida Order Selaginales. In some embodiments the PtIP-83 polypeptide is derived from a fern species in the Class Isoetopsida, Order Selaginales, Family Selaginellaceae. In some embodiments the PtIP-83 polypeptide is derived from a species in the Genus Selaginella. In some embodiments the PtIP-83 polypeptide is derived from a species in the Class Lycopodiopsida, Order Lycopodiales.

[0158] In some embodiments the PtIP-83 polypeptide is derived from a fern species in the Class Lycopodiopsida, Order Lycopodiales Family Lycopodiaceae or Family Huperziaceae.

[0159] In some embodiments the PtIP-83 polypeptide is derived from a species in the Genus Austrolycopodium, Dendrolycopodium, Diphasiastrum, Diphasium, Huperzia, Lateristachys, Lycopodiastrum, Lycopodiella, Lycopodium, Palhinhaea, Pseudodiphasium, Pseudolycopodiella, Pseudolycopodium or Spinulum.

[0160] In some embodiments the PtIP-83 polypeptide is derived from a species in the Genus Lycopodium.

[0161] In some embodiments the PtIP-83 polypeptide is derived from a species in the Genus Huperzia.

### Phylogenetic, Sequence Motif, and Structural Analyses for Insecticidal Protein Families

[0162] The sequence and structure analysis method employed is composed of four components: phylogenetic tree construction, protein sequence motifs finding, secondary structure prediction, and alignment of protein sequences and secondary structures. Details about each component are illustrated below.

### Phylogenetic Tree Construction

[0163] The phylogenetic analysis was performed using the software MEGA5. Protein sequences were subjected to ClustalW version 2 analysis (Larkin M. A et al (2007) Bioinformatics 23(21): 2947-2948) for multiple sequence alignment. The evolutionary history was then inferred by the Maximum Likelihood method based on the JTT matrix-based model. The tree with the highest log likelihood was obtained, exported in Newick format, and further processed to extract the sequence IDs in the same order as they appeared in the tree. A few clades representing sub-families were manually identified for each insecticidal protein family.

### Protein Sequence Motifs Finding

[0164] Protein sequences were re-ordered according to the phylogenetic tree built previously, and fed to the MOTIF analysis tool MEME (Multiple EM for MOTIF Elicitation) (Bailey T. L., and Elkan C., Proceedings of the Second International Conference on Intelligent Systems for Molecular Biology, pp. 28-36, AAAI Press, Menlo Park, California, 1994.) for identification of key sequence motifs. MEME was setup as follows: Minimum number of sites 2, Minimum motif width 5, and Maximum number of motifs 30. Sequence motifs unique to each sub-family were identified by visual observation. The distribution of MOTIFs across the entire gene family could be visualized in HTML webpage. The MOTIFs are numbered relative to the ranking of the E-value for each MOTIF. The amino acid sequence MOTIFs identified for each of the PtIP-83 polypeptides and the residue ranges defining the MOTIFs relative to each of the corresponding sequence identifier (SEQ ID NO:) are shown in Table 2. FIG. 2 shows an alignment of the PtIP-83 polypeptides PtIP-83Aa (SEQ ID NO: 1), PtIP-83Ca (SEQ ID NO: 5), PtIP-83Cb (SEQ ID NO: 7), PtIP-83Cc (SEQ ID NO: 9), PtIP-83Cd (SEQ ID NO: 11), PtIP-83Ce (SEQ ID NO: 13), PtIP-83Cf (SEQ ID NO: 15), and PtIP-83Fa (SEQ ID NO: 3), and the location relative to PtIP-83Aa (SEQ ID NO: 1) of the amino acid sequence MOTIFs present in PtIP-83Aa (SEQ ID NO: 1).

### Secondary Structure Prediction

[0165] PSIPRED, top ranked secondary structure prediction method (Jones D T. (1999) J. Mol. Biol. 292: 195-202), was installed in local Linux server, and used for protein secondary structure prediction. The tool provides accurate structure prediction using two feed-forward neural networks based on the PSI-BLAST output. The PSI-BLAST database was created by removing low-complexity, transmembrane, and coiled-coil regions in Uniref100. The PSIPRED results contain the PtIP-secondary structures (Alpha helix: H, Beta strand: E, and Coil: C) and the corresponding confidence scores for each amino acid in a given protein sequence. FIG. 2 shows the PtIP-83 polypeptide amino acid sequence alignments and the conserved secondary structural regions.

TABLE 2

| | SEQ ID NO: | MOTIF 19 | MOTIF 7 | MOTIF 13 | MOTIF 20 | MOTIF 10 | MOTIF 18 |
|---|---|---|---|---|---|---|---|
| PtIP-83Aa | 1 | 4-17 | 21-64 | 71-100 | 102-120 | n.p. | n.p. |
| PtIP-83Ca | 5 | 1-14 | 17-60 | 68-97 | 98-116 | 122-171 | 173-208 |
| PtIP-83Cb | 7 | 1-14 | 17-60 | 69-98 | n.p. | 121-170 | n.p. |
| PtIP-83Cc | 9 | 1-14 | 17-60 | 68-97 | 98-116 | 122-171 | 173-208 |
| PtIP-83Cd | 11 | 1-14 | 17-60 | 68-97 | 98-116 | 122-171 | 173-208 |
| PtIP-83Ce | 13 | 1-14 | 17-60 | 68-97 | 98-116 | 121-170 | 173-208 |
| PtIP-83Cf | 15 | 1-14 | 21-64 | 68-97 | 98-116 | 122-171 | n.p. |
| PtIP-83Fa | 3 | 5-18 | 17-60 | 68-97 | n.p. | n.p. | n.p. |
| | SEQ ID NO: | MOTIF 24 | MOTIF 14 | MOTIF 11 | MOTIF 22 | MOTIF 2 | MOTIF 8 |
| PtIP-83Aa | 1 | n.p. | 238-263 | n.p. | 313-326 | 327-376 | 376-425 |
| PtIP-83Ca | 5 | 211-220 | 221-246 | 248-297 | 298-311 | 312-361 | 362-411 |
| PtIP-83Cb | 7 | n.p. | 223-248 | 249-298 | 299-312 | 313-362 | 363-412 |
| PtIP-83Cc | 9 | 211-220 | 221-246 | 248-297 | 298-311 | 312-361 | 362-411 |
| PtIP-83Cd | 11 | 211-220 | 221-246 | 248-297 | 298-311 | 312-361 | 362-411 |
| PtIP-83Ce | 13 | 211-220 | 221-246 | 248-297 | 298-311 | 312-361 | 362-411 |
| PtIP-83Cf | 15 | 211-220 | 221-246 | 248-297 | 298-311 | 312-361 | 362-411 |
| PtIP-83Fa | 3 | 247-256 | 262-287 | n.p. | 329-342 | 344-393 | 394-443 |
| | SEQ ID NO: | MOTIF 21 | MOTIF 15 | MOTIF 9 | MOTIF 1 | MOTIF 17 | MOTIF 6 |
| PtIP-83Aa | 1 | 508-521 | 428-453 | 455-504 | 523-572 | 576-594 | 596-645 |
| PtIP-83Ca | 5 | 493-506 | 413-438 | 441-490 | 508-557 | 561-579 | 581-630 |
| PtIP-83Cb | 7 | 494-507 | 414-439 | 442-491 | 509-558 | 562-580 | 582-631 |
| PtIP-83Cc | 9 | 493-506 | 413-438 | 441-490 | 508-557 | 561-579 | 581-630 |
| PtIP-83Cd | 11 | 493-506 | 413-438 | 441-490 | 508-557 | 561-579 | 581-630 |
| PtIP-83Ce | 13 | 493-506 | 413-438 | 441-490 | 508-557 | 561-579 | 581-630 |
| PtIP-83Cf | 15 | 493-506 | 413-438 | 441-490 | 508-557 | 561-579 | 581-630 |
| PtIP-83Fa | 3 | 525-538 | 445-470 | 473-522 | 540-589 | 593-611 | 613-662 |
| | SEQ ID NO: | MOTIF 12 | MOTIF 4 | MOTIF 16 | MOTIF 5 | MOTIF 23 | MOTIF 3 |
| PtIP-83Aa | 1 | 648-683 | 684-719 | 723-741 | 746-795 | 798-807 | 809-858 |
| PtIP-83Ca | 5 | 634-669 | 670-705 | 708-726 | 732-781 | 784-793 | 795-844 |
| PtIP-83Cb | 7 | 635-670 | 671-706 | 709-727 | 731-780 | 783-792 | 794-843 |
| PtIP-83Cc | 9 | 634-669 | 670-705 | 708-726 | 730-779 | 782-791 | 793-842 |
| PtIP-83Cd | 11 | 634-669 | 670-705 | 708-726 | 730-779 | 782-791 | 793-842 |
| PtIP-83Ce | 13 | 634-669 | 670-705 | 708-726 | 730-779 | 782-791 | 793-842 |
| PtIP-83Cf | 15 | 634-669 | 670-705 | 708-726 | 731-780 | 783-792 | 794-843 |
| PtIP-83Fa | 3 | 667-702 | 703-738 | 740-758 | 763-812 | 815-824 | 826-875 |

n.p. = not present

### Alignment of Protein Sequences and Secondary Structures

[0166] A customized script was developed to generate gapped secondary structure alignment according to the multiple protein sequence alignment from step 1 for all proteins. All aligned protein sequences and structures were concatenated into a single FASTA file, and then imported into MEGA for visualization and identification of conserved structures.

[0167] In some embodiments a PtIP-83 polypeptide comprises an amino acid sequence MOTIF selected from: an amino acid sequence MOTIF 1 as represented by an amino acid sequence of the formula MP[DE]MPSEADWSIFVNE[IV]EAVAEGMPTEVSEVP[AV]WKAKCKN[MV]AALGREM[SC]I (SEQ ID NO: 646); an amino acid sequence MOTIF 2 as represented by an amino acid sequence of the formula PQLQYRMYG[NS]LI[KN]QMAQVAQNYDQ[ED]FKQ[FL]KLFI[IA]QNQI[LF]GSYLLQQN[KR]A F (SEQ ID NO: 647); an amino acid sequence MOTIF 3 as represented by an amino acid sequence of the formula NTFMQMTPFTRWRLRLSASASENA[EG]LAFPTATA[PL]DSTT[EQ][IV]VITFHVTAIR (SEQ ID NO: 648); an amino acid sequence MOTIF 4 as represented by an amino acid sequence of the formula [DN]FTSRHVVK[GD]IPVSLLLDGEDWEFEIPVQ[AG]GMSSFP (SEQ ID NO: 649); an amino acid sequence MOTIF 5 as represented by an amino acid sequence of the formula IIHQP[SA]T[RQ][ST]G[IT]VYILLQGSTIFHDRRR[DE]EVMTFQAA[DA]PLN[FY][QH]YAYRLDT G (SEQ ID NO: 650); an amino acid sequence MOTIF 6 as represented by an amino acid sequence of the formula S[HQ]ADRLAAIQP[AV]DLTN[HY]LEMAT[HQ]MDMRTT[RS][MI]L[IL]GLLN[MI]LRIQNAALMY EY (SEQ ID NO: 651); an amino acid sequence MOTIF 7 as represented by an amino acid sequence of the formula [VL]DRVEFSEVMVIHRMYVRL[SA]DL[ND]VGEL[PE]GA[EG][RK]VKR[VL]YV[FL]ADVVE (SEQ ID NO: 652); an amino acid sequence MOTIF 8 as represented by an amino acid sequence of the formula A[DE]RELQMESFHSAVISQRRQEL[ND]TA[IF]AKM[DE]R[LM]SLQMEEE[NS]RAMEQAQKE M (SEQ ID NO: 653); an amino acid sequence MOTIF 9 as represented by an amino acid sequence of the formula FVTAGATAPGA[AV]ASAGQAVSIAGQAAQ[AG]LRRVVEILE[GQ]LEAVMEVVAA[VI]K (SEQ ID NO: 654); an amino acid sequence MOTIF 10 as represented by an amino acid sequence of the formula DGMNWG[IT]YI[YH]GE[KE]V[EQ]RSPLLPSNAILAVWADRC[TI]ITSARHNH[VF]NAPGR[IV]I (SEQ ID NO: 655); an amino acid sequence MOTIF 11 as represented by an amino acid sequence of the formula [KV][VK][CA]RPPSPDM[MV]SAVAEHALWLNDVLLQVVQ[KN]ESQ[LM]QGT[AE]PYNECLAL LGR (SEQ ID NO: 656); an amino acid sequence MOTIF 12 as represented by an amino acid sequence of the formula PTELT[VA]WPLGMDTV[AG]NLLIAQENAAL[VL]GLIQLGPSS (SEQ ID NO: 657); an amino acid sequence MOTIF 13 as represented by an amino acid sequence of the formula RDQ[MT][HQ]MPGSVTVI[IV]LCRLLQFP[IT]DGSQA[TA]T (SEQ ID NO: 658); an amino acid sequence MOTIF 14 as represented by an amino acid sequence of the formula TSIPVEVVTDP[SN]ILLGMQTTV[LH]IAEL (SEQ ID NO: 659); an amino acid sequence MOTIF 15 as represented by an amino acid sequence of the formula EGLR[EQ]FQNRQVARA[VL]FAVLKAVA[MQ]I[AG] (SEQ ID NO: 660); an amino acid sequence MOTIF 16 as represented by an amino acid sequence of the formula W[TS]RVRIRHLEM[QH]F[AV]QEASG (SEQ ID NO: 661); an amino acid sequence MOTIF 17 as represented by an amino acid sequence of the formula QISELQY[ED]IWVQG[LM][ML]RDIA (SEQ ID NO: 662); an amino acid sequence MOTIF 18 as represented by an amino acid sequence of the formula TFTLGSGVTGITSMHGEPSLDPWNGVSLDSASPTAF (SEQ ID NO: 663); an amino acid sequence MOTIF 19 as represented by an amino acid sequence of the formula MDYSTLYRDLNQIS (SEQ ID NO: 664); an amino acid sequence MOTIF 20 as represented by an amino acid sequence of the formula LRLPFM[QK]LHARVIEQN[VR]K[SE] (SEQ ID NO: 665); an amino acid sequence MOTIF 21 as represented by an amino acid sequence of the formula VDSLEQVG[QH][IL]V[GD]AP (SEQ ID NO: 666); an amino acid sequence MOTIF 22 as represented by an amino acid sequence of the formula [IV][EQ][CA]VMK[IM]GRF[VG][SL]VV (SEQ ID NO: 667); an amino acid sequence MOTIF 23 as represented by an amino acid sequence of the formula TLTNEPSE[EQ]F (SEQ ID NO: 668); and an amino acid sequence MOTIF 24 as represented by an amino acid sequence of the formula LPRQSRNISF (SEQ ID NO: 669).

[0168] In some embodiments a PtIP-83 polypeptide comprises an amino acid sequence MOTIF selected from: an amino acid sequence MOTIF 1 having at least 90% sequence identity to the amino acid sequence as represented by the formula MP[DE]MPSEADWSIFVNE[IV]EAVAEGMPTEVSEVP[AV]WKAKCKN[MV]AALGREM[SC]I (SEQ ID NO: 646); an amino acid sequence MOTIF 2 having at least 90% sequence identity to the amino acid sequence as represented by the formula PQLQYRMYG[NS]LI[KN]QMAQVAQNYDQ[ED]FKQ[FL]KLFI[IA]QNQI[LF]GSYLLQQN[KR]A F (SEQ ID NO: 647); an amino acid sequence MOTIF 3 having at least 90% sequence identity to the amino acid sequence as represented by the formula NTFMQMTPFTRWRLRLSASASENA[EG]LAFPTATA[PL]DSTT[EQ][IV]VITFHVTAIR (SEQ ID NO: 648); an amino acid sequence MOTIF 4 having at least 90% sequence identity to the amino acid sequence as represented by the formula [DN]FTSRHVVK[GD]IPVSLLLDGEDWEFEIPVQ[AG]GMSSFP (SEQ ID NO: 649); an amino acid sequence MOTIF 5 having at least 90% sequence identity to the amino acid sequence as represented by the formula IIHQP[SA]T[RQ][ST]G[IT]VYILLQGSTIFHDRRR[DE]EVMTFQAA[DA]PLN[FY][QH]YAYRLDT G (SEQ ID NO: 650); an amino acid sequence MOTIF 6 having at least 90% sequence identity to the amino acid sequence as represented by the formula S[HQ]ADRLAAIQP[AV]DLTN[HY]LEMAT[HQ]MDMRTT[RS][MI]L[IL]GLLN[MI]LRIQNAALMY EY (SEQ ID NO: 651); an amino acid sequence MOTIF 7 having at least 90% sequence identity to the amino acid sequence as represented by the formula [VL]DRVEFSEVMVIHRMYVRL[SA]DL[ND]VGEL[PE]GA[EG][RK]VKR[VL]YV[FL]ADVVE (SEQ ID NO: 652); an amino acid sequence MOTIF 8 having at least 90% sequence identity to the amino acid sequence as represented by the formula A[DE]RELQMESFHSAVISQRRQEL[ND]TA[IF]AKM[DE]R[LM]SLQMEEE[NS]RAMEQAQKE M (SEQ ID NO: 653); an amino acid sequence MOTIF 9 having at least 90% sequence identity to the amino acid sequence as represented by the formula FVTAGATAPGA[AV]ASAGQAVSIAGQAAQ[AG]LRRVVEILE[GQ]LEAVMEVVAA[VI]K (SEQ ID NO: 654); an amino acid sequence MOTIF 10 having at least 90% sequence identity to the amino acid sequence as represented by the formula DGMNWG[IT]YI[YH]GE[KE]V[EQ]RSPLLPSNAILAVWADRC[TI]ITSARHNH[VF]NAPGR[IV]I (SEQ ID NO: 655); an amino acid sequence MOTIF 11 having at least 90% sequence identity to the amino acid sequence as represented by the formula [KV][VK][CA]RPPSPDM[MV]SAVAEHALWLNDVLLQVVQ[KN]ESQ[LM]QGT[AE]PYNECLAL LGR (SEQ ID NO: 656); an amino acid sequence MOTIF 12 having at least 90% sequence identity to the amino acid sequence as represented by the formula PTELT[VA]WPLGMDTV[AG]NLLIAQENAAL[VL]GLIQLGPSS (SEQ ID NO: 657); an amino acid sequence MOTIF 13 having at least 90% sequence identity to the amino acid sequence as represented by the formula RDQ[MT][HQ]MPGSVTVI[IV]LCRLLQFP[IT]DGSQA[TA]T (SEQ ID NO: 658); an amino acid sequence MOTIF 14 having at least 90% sequence identity to the amino acid sequence as represented by the formula TSIPVEVVTDP[SN]ILLGMQTTV[LH]IAEL (SEQ ID NO: 659); an amino acid sequence MOTIF 15 having at least 90% sequence identity to the amino acid sequence as represented by the formula EGLR[EQ]FQNRQVARA[VL]FAVLKAVA[MQ]I[AG] (SEQ ID NO: 660); an amino acid sequence MOTIF 16 having at least 90% sequence identity to the amino acid sequence as represented by the formula W[TS]RVRIRHLEM[QH]F[AV]QEASG (SEQ ID NO: 661); an amino acid sequence MOTIF 17 having at least 90% sequence identity to the amino acid sequence as represented by the formula QISELQY[ED]IWVQG[LM][ML]RDIA (SEQ ID NO: 662); an amino acid sequence MOTIF 18 having at least 90% sequence identity to the amino acid sequence as represented by the formula TFTLGSGVTGITSMHGEPSLDPWNGVSLDSASPTAF (SEQ ID NO: 663); an amino acid sequence MOTIF 19 having at least 90% sequence identity to the amino acid sequence as represented by the formula MDYSTLYRDLNQIS (SEQ ID NO: 664); an amino acid sequence MOTIF 20 having at least 90% sequence identity to the amino acid sequence as represented by the formula LRLPFM[QK]LHARVIEQN[VR]K[SE] (SEQ ID NO: 665); an amino acid sequence MOTIF 21 having at least 90% sequence identity to the amino acid sequence as represented by the formula VDSLEQVG[QH][IL]V[GD]AP (SEQ ID NO: 666); an amino acid sequence MOTIF 22 having at least 90% sequence identity to the amino acid sequence as represented by the formula [IV][EQ][CA]VMK[IM]GRF[VG][SL]VV (SEQ ID NO: 667); an amino acid sequence MOTIF 23 having at least 90% sequence identity to the amino acid sequence as represented by the formula TLTNEPSE[EQ]F (SEQ ID NO: 668); and an amino acid sequence MOTIF 24 having at least 90% sequence identity to the amino acid sequence as represented by the formula LPRQSRNISF (SEQ ID NO: 669).

[0169] In some embodiments a PtIP-83 polypeptide comprises an amino acid sequence MOTIF selected from: an amino acid sequence MOTIF 1 as represented by an amino acid sequence of the formula MP[DE]MP[ST][ED]ADWSIFVNE[IVL]EAVAEGMPTEVSEVP[AV]W[KR]AKCKN[MV]AALGRE M[SC]I (SEQ ID NO: 670); an amino acid sequence MOTIF 2 as represented by an amino acid sequence of the formula PQLQYRMYG[NS]LI[KRN]QMAQVAQNYD[QR][ED]FK[QR][FL][KR]LFI[IAVL]QNQI[LF]GSYL L[QE]QN[KR]AF (SEQ ID NO: 671); an amino acid sequence MOTIF 3 as represented by an amino acid sequence of the formula N[TK]FMQMTPFT[RH]WRLRLSASA[SPKA]EN[AK][EG]LAFPTATA[PL]DSTT[EQ][IV][VA]ITF HVTAIR (SEQ ID NO: 672); an amino acid sequence MOTIF 4 as represented by an amino acid sequence of the formula [DN]FTSRHVVK[GD]IPV[SN]LLLDG[EG]DWEFEIPVQ[AG]GMSSFP (SEQ ID NO: 673); an amino acid sequence MOTIF 5 as represented by an amino acid sequence of the formula IIHQP[SA]T[RQ][ST]G[IT][VI]YILLQGST[IV]FHDRRR[DE][EQ]V[ML]T[FP]QAA[DAV]PLN[FY][QH]YAYRLDTG (SEQ ID NO: 674); an amino acid sequence MOTIF 6 as represented by an amino acid sequence of the formula S[HQ]ADRLAAIQP[AV][DN]LTN[HYF]LEMAT[HQ]MDMRTT[RS][MI]L[IL]GLLN[MI][LM]RIQN AAL[MR]YEY (SEQ ID NO: 675); an amino acid sequence MOTIF 7 as represented by an amino acid sequence of the formula [VL]D[RQ]VEFSEVMVIHRMYV[N]RL[SA]DL[ND]V[GA][EQ]L[PE]GA[EG][RK]VKR[VL]YV[FL]ADVVE (SEQ ID NO: 676); an amino acid sequence MOTIF 8 as represented by an amino acid sequence of the formula A[DE]RELQMESFH[SA]AVISQ[RK]R[QGE]EL[ND][TD][AT][IF]AKM[DE]R[LM]SLQMEEE[NS D][RG]AMEQA[QR]KEM (SEQ ID NO: 677); an amino acid sequence MOTIF 9 as represented by an amino acid sequence of the formula F[VL]TAGATAPGA[AV]ASAGQAV[SN]IAGQAAQ[AG]LRRVVEILE[GQ]LEAVMEVVAA[VI]K (SEQ ID NO: 678); an amino acid sequence MOTIF 10 as represented by an amino acid sequence of the formula D[GD][MA][NK]WG[IT]Y[IV][YH][GA]E[KE]V[EQ][RVL]SPL[LYF][PN][SNG][NW][ASP][IY]L[AG V]V[WE]A[DQ]R[CS][TI]IT[SA]A[RFM]HN[HVT][VF][ND][AER]PG[RW][IV][IR] (SEQ ID NO: 679); an amino acid sequence MOTIF 11 as represented by an amino acid sequence of the formula [KV][VK][CA][RGC][PHY]PSP[DE][MIL][MV]SAV[AG][EV]HA[LIN]WL[NS][DK]VLL[QR]VVQ[K N]ES[QH][LM]QGT[AE][PSA]YNECLALLGR (SEQ ID NO: 680); an amino acid sequence MOTIF 12 as represented by an amino acid sequence of the formula [PN]T[EQ]LT[VAT]WPL[GR]MDTV[AG][ND]LLI[AT][QH]E[NS]AAL[VLS]GL[ITMA]QLG[PQ][S P]S (SEQ ID NO: 681); an amino acid sequence MOTIF 13 as represented by an amino acid sequence of the formula [RLC][DLWK][QNPR][MTP][HQR][MIL]PGSVTVI[IV]LCRLLQFP[IT][DG]G[SR][QFR][AS][TAD][TW] (SEQ ID NO: 682); an amino acid sequence MOTIF 14 as represented by an amino acid sequence of the formula [TA][SGV][IL]PV[ED]VVTDP[SN]IL[LM]GMQT[TS]V[LH]IAEL (SEQ ID NO: 683); an amino acid sequence MOTIF 15 as represented by an amino acid sequence of the formula EGLR[EQ]FQN[RE]QVA[RN]A[VL]FAVL[KS][AS]VA[MQ]I[AG] (SEQ ID NO: 684); an amino acid sequence MOTIF 16 as represented by an amino acid sequence of the formula W[TS]RVRIRHLEM[QH]F[AV][QK]E[AS][SM][GN] (SEQ ID NO: 685); an amino acid sequence MOTIF 17 as represented by an amino acid sequence of the formula Q[IM]S[EQ]LQY[ED]IWVQG[LM][ML]RD[IM]A (SEQ ID NO: 686); an amino acid sequence MOTIF 18 as represented by an amino acid sequence of the formula TFTLGSGVTGITSMHGEPSLDPWNGVSLDSASPTAF (SEQ ID NO: 663); an amino acid sequence MOTIF 19 as represented by an amino acid sequence of the formula [MLV]DY[SK][TSK]L[YF][RE]DLNQIS (SEQ ID NO: 687); an amino acid sequence MOTIF 20 as represented by an amino acid sequence of the formula L[RHQ]L[PT]FM[QK]LHA[RIT][VQL][IR]E[QER][NF][VR][KWS][SE] (SEQ ID NO: 688); an amino acid sequence MOTIF 21 as represented by an amino acid sequence of the formula V[DN][SA]L[ED]QV[GS][QH][IL]V[GD]AP (SEQ ID NO: 689); an amino acid sequence MOTIF 22 as represented by an amino acid sequence of the formula [IV][EQH][CAS][VA][MI]K[IM][GV][RP][FI][VG][SL]VV (SEQ ID NO: 690); an amino acid sequence MOTIF 23 as represented by an amino acid sequence of the formula TLTN[EQ]PSE[EQDH]F (SEQ ID NO: 691); and an amino acid sequence MOTIF 24 as represented by an amino acid sequence of the formula LP[RS]QS[RT]N[IV]SF (SEQ ID NO: 692).

[0170] In some embodiments a PtIP-83 polypeptide comprises an amino acid sequence MOTIF selected from: an amino acid sequence MOTIF 1 having at least 90% sequence identity to the amino acid sequence as represented by the formula MP[DE]MP[ST][ED]ADWSIFVNE[IVL]EAVAEGMPTEVSEVP[AV]W[KR]AKCKN[MV]AALGRE M[SC]I (SEQ ID NO: 670); an amino acid sequence MOTIF 2 having at least 90% sequence identity to the amino acid sequence as represented by the formula PQLQYRMYG[NS]LI[KRN]QMAQVAQNYD[QR][ED]FK[QR][FL][KR]LFI[IAVL]QNQI[LF]GSYL L[QE]QN[KR]AF (SEQ ID NO: 671); an amino acid sequence MOTIF 3 having at least 90% sequence identity to the amino acid sequence as represented by the formula N[TK]FMQMTPFT[RH]WRLRLSASA[SPKA]EN[AK][EG]LAFPTATA[PL]DSTT[EQ][IV][VA]ITF HVTAIR (SEQ ID NO: 672); an amino acid sequence MOTIF 4 having at least 90% sequence identity to the amino acid sequence as represented by the formula [DN]FTSRHVVK[GD]IPV[SN]LLLDG[EG]DWEFEIPVQ[AG]GMSSFP (SEQ ID NO: 673); an amino acid sequence MOTIF 5 having at least 90% sequence identity to the amino acid sequence as represented by the formula IIHQP[SA]T[RQ][ST]G[IT][VI]YILLQGST[IV]FHDRRR[DE][EQ]V[ML]T[FP]QAA[DAV]PLN[FY][QH]YAYRLDTG (SEQ ID NO: 674); an amino acid sequence MOTIF 6 having at least 90% sequence identity to the amino acid sequence as represented by the formula S[HQ]ADRLAAIQP[AV][DN]LTN[HYF]LEMAT[HQ]MDMRTT[RS][MI]L[IL]GLLN[MI][LM]RIQN AAL[MR]YEY (SEQ ID NO: 675); an amino acid sequence MOTIF 7 having at least 90% sequence identity to the amino acid sequence as represented by the formula [VL]D[RQ]VEFSEVMVIHRMYV[N]RL[SA]DL[ND]V[GA][EQ]L[PE]GA[EG][RK]VKR[VL]YV[FL]ADVVE (SEQ ID NO: 676); an amino acid sequence MOTIF 8 having at least 90% sequence identity to the amino acid sequence as represented by the formula A[DE]RELQMESFH[SA]AVISQ[RK]R[QGE]EL[ND][TD][AT][IF]AKM[DE]R[LM]SLQMEEE[NS D][RG]AMEQA[QR]KEM (SEQ ID NO: 677); an amino acid sequence MOTIF 9 having at least 90% sequence identity to the amino acid sequence as represented by the formula F[VL]TAGATAPGA[AV]ASAGQAV[SN]IAGQAAQ[AG]LRRVVEILE[GQ]LEAVMEVVAA[VI]K (SEQ ID NO: 678); an amino acid sequence MOTIF 10 having at least 90% sequence identity to the amino acid sequence as represented by the formula D[GD][MA][NK]WG[IT]Y[IV][YH][GA]E[KE]V[EQ][RVL]SPL[LYF][PN][SNG][NW][ASP][IY]L[AG V]V[WE]A[DQ]R[CS][TI]IT[SA]A[RFM]HN[HVT][VF][ND][AER]PG[RW][IV][IR] (SEQ ID NO: 679); an amino acid sequence MOTIF 11 having at least 90% sequence identity to the amino acid sequence as represented by the formula [KV][VK][CA][RGC][PHY]PSP[DE][MIL][MV]SAV[AG][EV]HA[LIN]WL[NS][DK]VLL[QR]VVQ[K N]ES[QH][LM]QGT[AE][PSA]YNECLALLGR (SEQ ID NO: 680); an amino acid sequence MOTIF 12 having at least 90% sequence identity to the amino acid sequence as represented by the formula [PN]T[EQ]LT[VAT]WPL[GR]MDTV[AG][ND]LLI[AT][QH]E[NS]AAL[VLS]GL[ITMA]QLG[PQ][S P]S (SEQ ID NO: 681); an amino acid sequence MOTIF 13 having at least 90% sequence identity to the amino acid sequence as represented by the formula [RLC][DLWK][QNPR][MTP][HQR][MIL]PGSVTVI[IV]LCRLLQFP[IT][DG]G[SR][QFR][AS][TAD][TW] (SEQ ID NO: 682); an amino acid sequence MOTIF 14 having at least 90% sequence identity to the amino acid sequence as represented by the formula [TA][SGV][IL]PV[ED]VVTDP[SN]IL[LM]GMQT[TS]V[LH]IAEL (SEQ ID NO: 683); an amino acid sequence MOTIF 15 having at least 90% sequence identity to the amino acid sequence as represented by the formula EGLR[EQ]FQN[RE]QVA[RN]A[VL]FAVL[KS][AS]VA[MQ]I[AG](SEQ ID NO: 684); an amino acid sequence MOTIF 16 having at least 90% sequence identity to the amino acid sequence as represented by the formula W[TS]RVRIRHLEM[QH]F[AV][QK]E[AS][SM][GN] (SEQ ID NO: 685); an amino acid sequence MOTIF 17 having at least 90% sequence identity to the amino acid sequence as represented by the formula Q[IM]S[EQ]LQY[ED]IWVQG[LM][ML]RD[IM]A (SEQ ID NO: 686); an amino acid sequence MOTIF 18 having at least 90% sequence identity to the amino acid sequence as represented by the formula TFTLGSGVTGITSMHGEPSLDPWNGVSLDSASPTAF (SEQ ID NO: 663); an amino acid sequence MOTIF 19 having at least 90% sequence identity to the amino acid sequence as represented by the formula [MLV]DY[SK][TSK]L[YF][RE]DLNQIS (SEQ ID NO: 687); an amino acid sequence MOTIF 20 having at least 90% sequence identity to the amino acid sequence as represented by the formula L[RHQ]L[PT]FM[QK]LHA[RIT][VQL][IR]E[QER][NF][VR][KWS][SE] (SEQ ID NO: 688); an amino acid sequence MOTIF 21 having at least 90% sequence identity to the amino acid sequence as represented by the formula V[DN][SA]L[ED]QV[GS][QH][IL]V[GD]AP (SEQ ID NO: 689); an amino acid sequence MOTIF 22 having at least 90% sequence identity to the amino acid sequence as represented by the formula [IV][EQH][CAS][VA][MI]K[IM][GV][RP][FI][VG][SL]VV (SEQ ID NO: 690); an amino acid sequence MOTIF 23 having at least 90% sequence identity to the amino acid sequence as represented by the formula TLTN[EQ]PSE[EQDH]F (SEQ ID NO: 691); and an amino acid sequence MOTIF 24 having at least 90% sequence identity to the amino acid sequence as represented by the formula LP[RS]QS[RT]N[IV]SF (SEQ ID NO: 692).

[0171] In some embodiments a PtIP-83 polypeptide comprises an amino acid sequence MOTIF selected from: an amino acid sequence MOTIF 1 as represented by an amino acid sequence of the formula MP[DE]MP[ST][ED]ADWSIFVNE[IVL]EAVAEGMPTEVSEVP[AVIL]W[KR]AKCKN[MVIL]AAL GREM[SCT]I (SEQ ID NO: 693); an amino acid sequence MOTIF 2 as represented by an amino acid sequence of the formula PQLQYRMYG[NS]LI[KRNQ]QMAQVAQNYD[QRNK][ED]FK[QRNK][FL][KR]LFI[IAVL]QNQI[L FIV]GSYLL[QEND]QN[KR]AF (SEQ ID NO: 694); an amino acid sequence MOTIF 3 as represented by an amino acid sequence of the formula N[TKSR]FMQMTPFT[RHK]WRLRLSASA[SPKATR]EN[AKR][EG]LAFPTATA[PLIV]DSTT[EQ ND][IVL][VAIL]ITFHVTAIR (SEQ ID NO: 695); an amino acid sequence MOTIF 4 as represented by an amino acid sequence of the formula [DNQE]FTSRHVVK[GDE]IPV[SNTQ]LLLDG[EGD]DWEFEIPVQ[AG]GMSSFP (SEQ ID NO: 696); an amino acid sequence MOTIF 5 as represented by an amino acid sequence of the formula IIHQP[SAT]T[RQKN][ST]G[ITLVS][VIL]YILLQGST[IVL]FHDRRR[DE][EQDN]V[MLIV]T[FP]QA A[DAVEIL]PLN[FY][QHN]YAYRLDTG (SEQ ID NO: 697); an amino acid sequence MOTIF 6 as represented by an amino acid sequence of the formula S[HQN]ADRLAAIQP[AVIL][DN]LTN[HYF]LEMAT[HQN]MDMRTT[RSKT][MILV]L[ILV]GLLN[M ILV][LMIV]RIQNAAL[MRILVK]YEY (SEQ ID NO: 698); an amino acid sequence MOTIF 7 as represented by an amino acid sequence of the formula [VLI]D[RQKN]VEFSEVMVIHRMYV[N]RL[SAT]DL[NDQE]V[GA][EQND]L[PED]GA[EGD][RK]VKR[VLI]YV[FLIV]ADVVE (SEQ ID NO: 699); an amino acid sequence MOTIF 8 as represented by an amino acid sequence of the formula A[DE]RELQMESFH[SAT]AVISQ[RK]R[QGEND]EL[NDQE][TDSE][ATS][IFLV]AKM[DE]R[LMI V]SLQMEEE[NSDQET][RGK]AMEQA[QRNK]KEM (SEQ ID NO: 700); an amino acid sequence MOTIF 9 as represented by an amino acid sequence of the formula F[VLI]TAGATAPGA[AVIL]ASAGQAV[SNTQ]IAGQAAQ[AG]LRRVVEILE[GQN]LEAVMEVVA A[VIL]K (SEQ ID NO: 701); an amino acid sequence MOTIF 10 as represented by an amino acid sequence of the formula D[GDE][MA][NKQK]WG[ITLVS]Y[IVL][YH][GA]E[KERD]V[EQND][RVLKI]SPL[LYFIV][PNQ][S NGTQ][NWQ][ASPT][IYLV]L[AGVIL]V[WED]A[DQNE]R[CST][TISLV]IT[SAT]A[RFMK]HN[HV TILS][VFIL][NDQE][AERDK]PG[RWK][IVL][IRLVK] (SEQ ID NO: 702); an amino acid sequence MOTIF 11 as represented by an amino acid sequence of the formula [KVRIL][VKRIL][CA][RGCK][PHY]PSP[DE][MILV][MVIL]SAV[AG][EVDIL]HA[LINVQ]WL[NSQ T][DKER]VLL[QRNK]VVQ[KNRQ]ES[QHN][LMIV]QGT[AED][PSAT]YNECLALLGR (SEQ ID NO: 703); an amino acid sequence MOTIF 12 as represented by an amino acid sequence of the formula [PNQ]T[EQDN]LT[VATILS]WPL[GRK]MDTV[AG][NDQE]LLI[ATS][QHN]E[NSQT]AAL[VLSIT]GL[ITMALVS]QLG[PQN][SPT]S (SEQ ID NO: 704); an amino acid sequence MOTIF 13 as represented by an amino acid sequence of the formula [RLCKIV][DLWKEIVR][QNPRK][MTP][HQR][MILV]PGSVTVI[IVL]LCRLLQFP[ITLVS][DGE]G[SRTK][QFRNK][AST][TADES][TWS] (SEQ ID NO: 705); an amino acid sequence MOTIF 14 as represented by an amino acid sequence of the formula [TA][SGVTIL][ILV]PV[ED]VVTDP[SNTQ]IL[LMIV]GMQT[TS]V[LHIV]IAEL (SEQ ID NO: 706); an amino acid sequence MOTIF 15 as represented by an amino acid sequence of the formula EGLR[EQND]FQN[REKD]QVA[RNKQ]A[VLI]FAVL[KSRT][AST]VA[MQN]I[AG] (SEQ ID NO: 707); an amino acid sequence MOTIF 16 as represented by an amino acid sequence of the formula W[TS]RVRIRHLEM[QHN]F[AVIL][QKNR]E[AST][SMT][GNQ] (SEQ ID NO: 708); an amino acid sequence MOTIF 17 as represented by an amino acid sequence of the formula Q[IMLV]S[EQND]LQY[ED]IWVQG[LMIV][MLIV]RD[IMLV]A (SEQ ID NO: 709); an amino acid sequence MOTIF 18 as represented by an amino acid sequence of the formula TFTLGSGVTGITSMHGEPSLDPWNGVSLDSASPTAF (SEQ ID NO: 663); an amino acid sequence MOTIF 19 as represented by an amino acid sequence of the formula [MLVI]DY[SKTR][TSKR]L[YF][REKD]DLNQIS (SEQ ID NO: 710); an amino acid sequence MOTIF 20 as represented by an amino acid sequence of the formula L[RHQKN]L[PTS]FM[QKNR]LHA[RITKLVS][VQLIN][IRLVK]E[QERNDK][NFQ][VRILK][KWSR T][SETD] (SEQ ID NO: 711); an amino acid sequence MOTIF 21 as represented by an amino acid sequence of the formula V[DNQE][SAT]L[ED]QV[GST][QHN][ILV]V[GDE]AP (SEQ ID NO: 712); an amino acid sequence MOTIF 22 as represented by an amino acid sequence of the formula [IVL][EQHND][CAST][VAIL][MILV]K[IMLV][GVIL][RPK][FILV][VGIL][SLTIV]VV (SEQ ID NO: 713); an amino acid sequence MOTIF 23 as represented by an amino acid sequence of the formula TLTN[EQDN]PSE[EQDHN]F (SEQ ID NO: 714); and an amino acid sequence MOTIF 24 as represented by an amino acid sequence of the formula LP[RSKT]QS[RTKS]N[IVL]SF (SEQ ID NO: 715).

[0172] In some embodiments a PtIP-83 polypeptide comprises an amino acid sequence MOTIF selected from: an amino acid sequence MOTIF 1 having at least 90% sequence identity to the amino acid sequence as represented by the formula MP[DE]MP[ST][ED]ADWSIFVNE[IVL]EAVAEGMPTEVSEVP[AVIL]W[KR]AKCKN[MVIL]AAL GREM[SCT]I (SEQ ID NO: 693); an amino acid sequence MOTIF 2 having at least 90% sequence identity to the amino acid sequence as represented by the formula PQLQYRMYG[NS]LI[KRNQ]QMAQVAQNYD[QRNK][ED]FK[QRNK][FL][KR]LFI[IAVL]QNQI[L FIV]GSYLL[QEND]QN[KR]AF (SEQ ID NO: 694); an amino acid sequence MOTIF 3 having at least 90% sequence identity to the amino acid sequence as represented by the formula N[TKSR]FMQMTPFT[RHK]WRLRLSASA[SPKATR]EN[AKR][EG]LAFPTATA[PLIV]DSTT[EQ ND][IVL][VAIL]ITFHVTAIR (SEQ ID NO: 695); an amino acid sequence MOTIF 4 having at least 90% sequence identity to the amino acid sequence as represented by the formula [DNQE]FTSRHVVK[GDE]IPV[SNTQ]LLLDG[EGD]DWEFEIPVQ[AG]GMSSFP (SEQ ID NO: 696); an amino acid sequence MOTIF 5 having at least 90% sequence identity to the amino acid sequence as represented by the formula IIHQP[SAT]T[RQKN][ST]G[ITLVS][VIL]YILLQGST[IVL]FHDRRR[DE][EQDN]V[MLIV]T[FP]QA A[DAVEIL]PLN[FY][QHN]YAYRLDTG (SEQ ID NO: 697); an amino acid sequence MOTIF 6 having at least 90% sequence identity to the amino acid sequence as represented by the formula S[HQN]ADRLAAIQP[AVIL][DN]LTN[HYF]LEMAT[HQN]MDMRTT[RSKT][MILV]L[ILV]GLLN[M ILV][LMIV]RIQNAAL[MRILVK]YEY (SEQ ID NO: 698); an amino acid sequence MOTIF 7 having at least 90% sequence identity to the amino acid sequence as represented by the formula [VLI]D[RQKN]VEFSEVMVIHRMYV[N]RL[SAT]DL[NDQE]V[GA][EQND]L[PED]GA[EGD][RK]VKR[VLI]YV[FLIV]ADVVE (SEQ ID NO: 699); an amino acid sequence MOTIF 8 having at least 90% sequence identity to the amino acid sequence as represented by the formula A[DE]RELQMESFH[SAT]AVISQ[RK]R[QGEND]EL[NDQE][TDSE][ATS][IFLV]AKM[DE]R[LMI V]SLQMEEE[NSDQET][RGK]AMEQA[QRNK]KEM (SEQ ID NO: 700); an amino acid sequence MOTIF 9 having at least 90% sequence identity to the amino acid sequence as represented by the formula F[VLI]TAGATAPGA[AVIL]ASAGQAV[SNTQ]IAGQAAQ[AG]LRRVVEILE[GQN]LEAVMEVVA A[VIL]K (SEQ ID NO: 701); an amino acid sequence MOTIF 10 having at least 90% sequence identity to the amino acid sequence as represented by the formula D[GDE][MA][NKQK]WG[ITLVS]Y[IVL][YH][GA]E[KERD]V[EQND][RVLKI]SPL[LYFIV][PNQ][S NGTQ][NWQ][ASPT][IYLV]L[AGVIL]V[WED]A[DQNE]R[CST][TISLV]IT[SAT]A[RFMK]HN[HV TILS][VFIL][NDQE][AERDK]PG[RWK][IVL][IRLVK] (SEQ ID NO: 702); an amino acid sequence MOTIF 11 having at least 90% sequence identity to the amino acid sequence as represented by the formula [KVRIL][VKRIL][CA][RGCK][PHY]PSP[DE][MILV][MVIL]SAV[AG][EVDIL]HA[LINVQ]WL[NSQ T][DKER]VLL[QRNK]VVQ[KNRQ]ES[QHN][LMIV]QGT[AED][PSAT]YNECLALLGR (SEQ ID NO: 703); an amino acid sequence MOTIF 12 having at least 90% sequence identity to the amino acid sequence as represented by the formula [PNQ]T[EQDN]LT[VATILS]WPL[GRK]MDTV[AG][NDQE]LLI[ATS][QHN]E[NSQT]AAL[VLSIT]GL[ITMALVS]QLG[PQN][SPT]S (SEQ ID NO: 704); an amino acid sequence MOTIF 13 having at least 90% sequence identity to the amino acid sequence as represented by the formula [RLCKIV][DLWKEIVR][QNPRK][MTP][HQR][MILV]PGSVTVI[IVL]LCRLLQFP[ITLVS][DGE]G[SRTK][QFRNK][AST][TADES][TWS] (SEQ ID NO: 705); an amino acid sequence MOTIF 14 having at least 90% sequence identity to the amino acid sequence as represented by the formula [TA][SGVTIL][ILV]PV[ED]VVTDP[SNTQ]IL[LMIV]GMQT[TS]V[LHIV]IAEL (SEQ ID NO: 706); an amino acid sequence MOTIF 15 having at least 90% sequence identity to the amino acid sequence as represented by the formula EGLR[EQND]FQN[REKD]QVA[RNKQ]A[VLI]FAVL[KSRT][AST]VA[MQN]I[AG] (SEQ ID NO: 707); an amino acid sequence MOTIF 16 having at least 90% sequence identity to the amino acid sequence as represented by the formula W[TS]RVRIRHLEM[QHN]F[AVIL][QKNR]E[AST][SMT][GNQ] (SEQ ID NO: 708); an amino acid sequence MOTIF 17 having at least 90% sequence identity to the amino acid sequence as represented by the formula Q[IMLV]S[EQND]LQY[ED]IWVQG[LMIV][MLIV]RD[IMLV]A (SEQ ID NO: 709); an amino acid sequence MOTIF 18 having at least 90% sequence identity to the amino acid sequence as represented by the formula TFTLGSGVTGITSMHGEPSLDPWNGVSLDSASPTAF (SEQ ID NO: 663); an amino acid sequence MOTIF 19 having at least 90% sequence identity to the amino acid sequence as represented by the formula [MLVI]DY[SKTR][TSKR]L[YF][REKD]DLNQIS (SEQ ID NO: 710); an amino acid sequence MOTIF 20 having at least 90% sequence identity to the amino acid sequence as represented by the formula L[RHQKN]L[PTS]FM[QKNR]LHA[RITKLVS][VQLIN][IRLVK]E[QERNDK][NFQ][VRILK][KWSR T][SETD] (SEQ ID NO: 711); an amino acid sequence MOTIF 21 having at least 90% sequence identity to the amino acid sequence as represented by the formula V[DNQE][SAT]L[ED]QV[GST][QHN][ILV]V[GDE]AP (SEQ ID NO: 712); an amino acid sequence MOTIF 22 having at least 90% sequence identity to the amino acid sequence as represented by the formula [IVL][EQHND][CAST][VAIL][MILV]K[IMLV][GVIL][RPK][FILV][VGIL][SLTIV]VV (SEQ ID NO: 713); an amino acid sequence MOTIF 23 having at least 90% sequence identity to the amino acid sequence as represented by the formula TLTN[EQDN]PSE[EQDHN]F (SEQ ID NO: 714); and an amino acid sequence MOTIF 24 having at least 90% sequence identity to the amino acid sequence as represented by the formula LP[RSKT]QS[RTKS]N[IVL]SF (SEQ ID NO: 715).

[0173] In some embodiment a PtIP-83 polypeptide comprises, sequentially from the N-terminus to the C-terminus, an amino acid sequence MOTIF selected from: MOTIF 19 (SEQ ID NO: 664, SEQ ID NO: 687 or SEQ ID NO: 710), MOTIF 7 (SEQ ID NO: 652, SEQ ID NO: 676 or SEQ ID NO: 699), MOTIF 13 (SEQ ID NO: 658, SEQ ID NO: 682 or SEQ ID NO: 705), MOTIF 20 (SEQ ID NO: 665, SEQ ID NO: 688 or SEQ ID NO: 711), MOTIF 10 (SEQ ID NO: 655, SEQ ID NO: 679 or SEQ ID NO: 702), MOTIF 18 (SEQ ID NO: 663), MOTIF 24 (SEQ ID NO: 669, SEQ ID NO: 692 or SEQ ID NO: 715), MOTIF 14 (SEQ ID NO: 659, SEQ ID NO: 683 or SEQ ID NO: 706), MOTIF 11 (SEQ ID NO: 656, SEQ ID NO: 680 or SEQ ID NO: 703), MOTIF 22 (SEQ ID NO: 667, SEQ ID NO: 690 or SEQ ID NO: 713), MOTIF 2 (SEQ ID NO: 647, SEQ ID NO: 671 or SEQ ID NO: 694), MOTIF 8 (SEQ ID NO: 653, SEQ ID NO: 677 or SEQ ID NO: 700), MOTIF 15 (SEQ ID NO: 660, SEQ ID NO: 684 or SEQ ID NO: 707), MOTIF 9 (SEQ ID NO: 654, SEQ ID NO: 678 or SEQ ID NO: 701), MOTIF 21 (SEQ ID NO: 666, SEQ ID NO: 689 or SEQ ID NO: 712), MOTIF 1 (SEQ ID NO: 646, SEQ ID NO: 670 or SEQ ID NO: 693), MOTIF 17 (SEQ ID NO: 662, SEQ ID NO: 686 or SEQ ID NO: 709), MOTIF 6 (SEQ ID NO: 651, SEQ ID NO: 675 or SEQ ID NO: 698), MOTIF 12 (SEQ ID NO: 657, SEQ ID NO: 681 or SEQ ID NO: 704), MOTIF 4 (SEQ ID NO: 649, SEQ ID NO: 673 or SEQ ID NO: 696), MOTIF 16 (SEQ ID NO: 661, SEQ ID NO: 685 or SEQ ID NO: 708), MOTIF 5 (SEQ ID NO: 650, SEQ ID NO: 674 or SEQ ID NO: 697), MOTIF 23 (SEQ ID NO: 668, SEQ ID NO: 691 or SEQ ID NO: 714), and MOTIF 3 (SEQ ID NO: 648, SEQ ID NO: 672 or SEQ ID NO: 695).

[0174] In some embodiments a PtIP-83 polypeptide comprises, sequentially from the N-terminus to the C-terminus, an amino acid sequence MOTIF selected from: MOTIF 19 (SEQ ID NO: 664, SEQ ID NO: 687 or SEQ ID NO: 710), MOTIF 7 (SEQ ID NO: 652, SEQ ID NO: 676 or SEQ ID NO: 699), MOTIF 13 (SEQ ID NO: 658, SEQ ID NO: 682 or SEQ ID NO: 705), MOTIF 20 (SEQ ID NO: 665, SEQ ID NO: 688 or SEQ ID NO: 711), MOTIF 14 (SEQ ID NO: 659, SEQ ID NO: 683 or SEQ ID NO: 706), MOTIF 2 (SEQ ID NO: 647, SEQ ID NO: 671 or SEQ ID NO: 694), MOTIF 8 (SEQ ID NO: 653, SEQ ID NO: 677 or SEQ ID NO: 700), MOTIF 15 (SEQ ID NO: 660, SEQ ID NO: 684 or SEQ ID NO: 707), MOTIF 9 (SEQ ID NO: 654, SEQ ID NO: 678 or SEQ ID NO: 701), MOTIF 21 (SEQ ID NO: 666, SEQ ID NO: 689 or SEQ ID NO: 712), MOTIF 1 (SEQ ID NO: 646, SEQ ID NO: 670 or SEQ ID NO: 693), MOTIF 17 (SEQ ID NO: 662, SEQ ID NO: 686 or SEQ ID NO: 709), MOTIF 6 (SEQ ID NO: 651, SEQ ID NO: 675 or SEQ ID NO: 698), MOTIF 12 (SEQ ID NO: 657, SEQ ID NO: 681 or SEQ ID NO: 704), MOTIF 4 (SEQ ID NO: 649, SEQ ID NO: 673 or SEQ ID NO: 696), MOTIF 16 (SEQ ID NO: 661, SEQ ID NO: 685 or SEQ ID NO: 708), MOTIF 5 (SEQ ID NO: 650, SEQ ID NO: 674 or SEQ ID NO: 697), MOTIF 23 (SEQ ID NO: 668, SEQ ID NO: 691 or SEQ ID NO: 714), and MOTIF 3 (SEQ ID NO: 648, SEQ ID NO: 672 or SEQ ID NO: 695).

[0175] In some embodiments a PtIP-83 polypeptide comprises, sequentially from the N-terminus to the C-terminus, the amino acid sequence MOTIFs: MOTIF 19 (SEQ ID NO: 664, SEQ ID NO: 687 or SEQ ID NO: 710), MOTIF 7 (SEQ ID NO: 652, SEQ ID NO: 676 or SEQ ID NO: 699), MOTIF 13 (SEQ ID NO: 658, SEQ ID NO: 682 or SEQ ID NO: 705), MOTIF 20 (SEQ ID NO: 665, SEQ ID NO: 688 or SEQ ID NO: 711), MOTIF 10 (SEQ ID NO: 655, SEQ ID NO: 679 or SEQ ID NO: 702), MOTIF 18 (SEQ ID NO: 663), MOTIF 24 (SEQ ID NO: 669, SEQ ID NO: 692 or SEQ ID NO: 715), MOTIF 14 (SEQ ID NO: 659, SEQ ID NO: 683 or SEQ ID NO: 706), MOTIF 11 (SEQ ID NO: 656, SEQ ID NO: 680 or SEQ ID NO: 703), MOTIF 22 (SEQ ID NO: 667, SEQ ID NO: 690 or SEQ ID NO: 713), MOTIF 2 (SEQ ID NO: 647, SEQ ID NO: 671 or SEQ ID NO: 694), MOTIF 8 (SEQ ID NO: 653, SEQ ID NO: 677 or SEQ ID NO: 700), MOTIF 15 (SEQ ID NO: 660, SEQ ID NO: 684 or SEQ ID NO: 707), MOTIF 9 (SEQ ID NO: 654, SEQ ID NO: 678 or SEQ ID NO: 701), MOTIF 21 (SEQ ID NO: 666, SEQ ID NO: 689 or SEQ ID NO: 712), MOTIF 1 (SEQ ID NO: 646, SEQ ID NO: 670 or SEQ ID NO: 693), MOTIF 17 (SEQ ID NO: 662, SEQ ID NO: 686 or SEQ ID NO: 709), MOTIF 6 (SEQ ID NO: 651, SEQ ID NO: 675 or SEQ ID NO: 698), MOTIF 12 (SEQ ID NO: 657, SEQ ID NO: 681 or SEQ ID NO: 704), MOTIF 4 (SEQ ID NO: 649, SEQ ID NO: 673 or SEQ ID NO: 696), MOTIF 16 (SEQ ID NO: 661, SEQ ID NO: 685 or SEQ ID NO: 708), MOTIF 5 (SEQ ID NO: 650, SEQ ID NO: 674 or SEQ ID NO: 697), MOTIF 23 (SEQ ID NO: 668, SEQ ID NO: 691 or SEQ ID NO: 714), and MOTIF 3 (SEQ ID NO: 648, SEQ ID NO: 672 or SEQ ID NO: 695).

[0176] In some embodiments a PtIP-83 polypeptide comprises, sequentially from the N-terminus to the C-terminus, the amino acid sequence MOTIFs: MOTIF 19 (SEQ ID NO: 664, SEQ ID NO: 687 or SEQ ID NO: 710), MOTIF 7 (SEQ ID NO: 652, SEQ ID NO: 676 or SEQ ID NO: 699), MOTIF 13 (SEQ ID NO: 658, SEQ ID NO: 682 or SEQ ID NO: 705), MOTIF 20 (SEQ ID NO: 665, SEQ ID NO: 688 or SEQ ID NO: 711), MOTIF 14 (SEQ ID NO: 659, SEQ ID NO: 683 or SEQ ID NO: 706), MOTIF 2 (SEQ ID NO: 647, SEQ ID NO: 671 or SEQ ID NO: 694), MOTIF 8 (SEQ ID NO: 653, SEQ ID NO: 677 or SEQ ID NO: 700), MOTIF 15 (SEQ ID NO: 660, SEQ ID NO: 684 or SEQ ID NO: 707), MOTIF 9 (SEQ ID NO: 654, SEQ ID NO: 678 or SEQ ID NO: 701), MOTIF 21 (SEQ ID NO: 666, SEQ ID NO: 689 or SEQ ID NO: 712), MOTIF 1 (SEQ ID NO: 646, SEQ ID NO: 670 or SEQ ID NO: 693), MOTIF 17 (SEQ ID NO: 662, SEQ ID NO: 686 or SEQ ID NO: 709), MOTIF 6 (SEQ ID NO: 651, SEQ ID NO: 675 or SEQ ID NO: 698), MOTIF 12 (SEQ ID NO: 657, SEQ ID NO: 681 or SEQ ID NO: 704), MOTIF 4 (SEQ ID NO: 649, SEQ ID NO: 673 or SEQ ID NO: 696), MOTIF 16 (SEQ ID NO: 661, SEQ ID NO: 685 or SEQ ID NO: 708), MOTIF 5 (SEQ ID NO: 650, SEQ ID NO: 674 or SEQ ID NO: 697), MOTIF 23 (SEQ ID NO: 668, SEQ ID NO: 691 or SEQ ID NO: 714), and MOTIF 3 (SEQ ID NO: 648, SEQ ID NO: 672 or SEQ ID NO: 695).

[0177] In some embodiments a PtIP-83 polypeptide comprises, sequentially from the N-terminus to the C-terminus: a Region A of between about 200 to about 300 amino acids in length comprising an amino acid sequence MOTIF of: MOTIF 19 (SEQ ID NO: 664, SEQ ID NO: 687 or SEQ ID NO: 710), MOTIF 7 (SEQ ID NO: 652, SEQ ID NO: 676 or SEQ ID NO: 699), MOTIF 13 (SEQ ID NO: 658, SEQ ID NO: 682 or SEQ ID NO: 705), MOTIF 20 (SEQ ID NO: 665, SEQ ID NO: 688 or SEQ ID NO: 711), MOTIF 10 (SEQ ID NO: 655, SEQ ID NO: 679 or SEQ ID NO: 702), MOTIF 18 (SEQ ID NO: 663), MOTIF 24 (SEQ ID NO: 669, SEQ ID NO: 692 or SEQ ID NO: 715), and/or MOTIF 14 having a predominantly nonconserved secondary structure; a Region B of between about 380 to about 465 amino acids in length comprising an amino acid sequence MOTIF of MOTIF 22 (SEQ ID NO: 667, SEQ ID NO: 690 or SEQ ID NO: 713), MOTIF 2 (SEQ ID NO: 647, SEQ ID NO: 671 or SEQ ID NO: 694), MOTIF 8 (SEQ ID NO: 653, SEQ ID NO: 677 or SEQ ID NO: 700), MOTIF 15 (SEQ ID NO: 660, SEQ ID NO: 684 or SEQ ID NO: 707), MOTIF 9 (SEQ ID NO: 654, SEQ ID NO: 678 or SEQ ID NO: 701), MOTIF 21 (SEQ ID NO: 666, SEQ ID NO: 689 or SEQ ID NO: 712), MOTIF 1 (SEQ ID NO: 646, SEQ ID NO: 670 or SEQ ID NO: 693), MOTIF 17 (SEQ ID NO: 662, SEQ ID NO: 686 or SEQ ID NO: 709), MOTIF 6 (SEQ ID NO: 651, SEQ ID NO: 675 or SEQ ID NO: 698), and/or MOTIF 12 and having a predominately alpha helical structure; and a Region C of between about 150 to about 180 amino acids in length comprising an amino acid sequence MOTIF of MOTIF 16 (SEQ ID NO: 661, SEQ ID NO: 685 or SEQ ID NO: 708), MOTIF 5 (SEQ ID NO: 650, SEQ ID NO: 674 or SEQ ID NO: 697), MOTIF 23 (SEQ ID NO: 668, SEQ ID NO: 691 or SEQ ID NO: 714), and/or MOTIF 3 having a consensus secondary structure comprising predominately beta strand structure.

[0178] In some embodiments a PtIP-83 polypeptide comprises sequentially from the N-terminus to the C-terminus: a Region A of between about 200 to about 300 amino acids in length having predominantly a nonconserved secondary structure; a Region B of between about 380 to about 465 amino acids in length having a consensus secondary structure comprising 8 to 10 segments of predominately alpha helical structure; and a Region C of between about 150 to about 180 amino acids in length having a consensus secondary structure comprising 6 to 8 segments of predominately beta strand structure. As used herein “predominantly a nonconserved secondary structure” means that the regions of secondary structure don't consistently align within the family of PtIP polypeptides. As used herein “predominately alpha helical structure” means that secondary structure prediction may have one or more gap of between 1 to 4 amino acids of coil and/or beta strand structure intervening in the alpha helix structure. As used herein “predominately beta strand structure” means that secondary structure prediction may have a gap of between 1 to 4 amino acids of coil and/or alpha helix structure intervening in the beta strand structure. In some embodiments the secondary structure is generated by the PSIPRED, top ranked secondary structure prediction method (Jones D T. (1999) J. Mol. Biol. 292: 195-202).

[0179] In some embodiments a PtIP-83 polypeptide comprises sequentially from the N-terminus to the C-terminus: a Region A of between about 200 to about 300 amino acids in length having a predominantly nonconserved secondary structure; a Region B of between about 380 to about 465 amino acids in length having a consensus secondary structure comprising nine segments of predominately alpha helical structure; and a Region C of between about 150 to about 180 amino acids in length having a consensus secondary structure comprising seven segments of predominately beta strand structure.

[0180] In some embodiments a PtIP-83 polypeptide comprises sequentially from the N-terminus to the C-terminus: a Region A of between about 200 to about 300 amino acids in length having a flexible consensus secondary structure, wherein the Region A comprises a conserved beta strand 1 (β1a) of between about 4 and about 12 amino acids in length within about amino acid residue 30 to about amino acid residue 130 from the N-terminus of the PtIP-83 polypeptide; a Region B of between about 380 to about 465 amino acids in length having a consensus secondary structure comprising nine segments of predominately alpha helical structure; and a Region C of between about 150 to about 180 amino acids in length having a consensus secondary structure comprising seven segments of predominately beta strand structure. As used herein, the term “about” when used in the context of the lower/upper limit of the length of a secondary structural element means the greater of −/+an integer of up to −/+20% of the length of the secondary structural element or −/+1 amino acid. By means of example, a secondary structure element of between about 3 amino acids and about 23 amino acids in length means a secondary structure element of between 2 and 27 amino acids in length.

[0181] In some embodiments a PtIP-83 polypeptide comprises sequentially from the N-terminus to the C-terminus: a Region A of between about 200 to about 300 amino acids in length having a flexible consensus secondary structure, wherein the Region A comprises a conserved beta strand 1 (β1a) of between about 4 and about 12 amino acids in length, a coil of between about 10 and about 20 amino acids in length and a beta strand 2 (β1b) of between about 4 and about 12 amino acids in length, within about amino acid residue 30 to about amino acid residue 165 from the N-terminus of the PtIP-83 polypeptide; a Region B of between about 380 to about 465 amino acids in length having a consensus secondary structure comprising nine segments of predominately alpha helical structure; and a Region C of between about 150 to about 180 amino acids in length having a consensus secondary structure comprising seven segments of predominately beta strand structure.

[0182] In some embodiments a PtIP-83 polypeptide comprises sequentially from the N-terminus to the C-terminus: a Region A of between about 200 to about 300 amino acids in length having a predominantly nonconserved secondary structure; a Region B of between about 380 to about 465 amino acids in length having a consensus secondary structure comprising sequentially: i) an alpha helix-1 of between about 10 and about 26 amino acids in length; ii) a coil-1 of between about 2 and about 8 amino acids in length flanked by alpha helix-1 and alpha helix-2; iii) an alpha helix-2 of between about 15 and about 24 amino acids in length; iv) a coil-2 of between about 4 and about 14 amino acids in length flanked by alpha helix-2 and alpha helix-3; v) an alpha helix 3 of between about 15 and about 27 amino acids in length; vi) a coil-3 of between about 11 and about 13 amino acids in length flanked by alpha helix-3 and alpha helix-4; vii) an alpha helix-4 of about 180 amino acids in length; viii) a coil-4 of between about 4 and about 5 amino acids in length flanked by alpha helix-4 and alpha helix-5; ix) an alpha helix-5 of between about 50 and about 54 amino acids in length; x) a coil-5 of between about 11 and about 17 amino acids in length flanked by alpha helix-5 and alpha helix-6; xi) an alpha helix-6 of between about 15 and about 16 amino acids in length; xii) a coil-6 of between about 6 and about 9 amino acids in length flanked by alpha helix-6 and alpha helix-7; xiii) an alpha helix-7 of between about 49 and about 55 amino acids in length; xiv) a coil-7 of between about 3 and about 8 amino acids in length flanked by alpha helix-7 and alpha helix-8; xv) an alpha helix-8 of between about 33 and about 36 amino acids in length; xvi) a coil-8 of between about 14 and about 16 amino acids in length flanked by alpha helix-8 and alpha helix-9; xvii) an alpha helix-9 of between about 16 and about 23 amino acids in length; xviii) a coil-9 of between about 21 and about 28 amino acids in length flanked by alpha helix-9 and Region C; and a Region C of between about 150 to about 180 amino acids in length having a consensus secondary structure comprising seven segments of predominately beta strand structure.

[0183] In some embodiments a PtIP-83 polypeptide comprises sequentially from the N-terminus to the C-terminus: a Region A of between about 200 to about 300 amino acids in length having a predominantly nonconserved secondary structure; a Region B of between about 380 to about 465 amino acids in length having a consensus secondary structure comprising nine segments of predominately alpha helical structure; and a Region C of between about 150 to about 180 amino acids in length having a consensus secondary structure comprising sequentially: i) a beta strand-1 (β1) of between about 3 amino acids and about 5 amino acids in length; ii) a coil of between about 13 amino acids and about 17 amino acids in length; iii) a beta strand-2 (β2) of between about 7 amino acids and about 11 amino acids in length; iv) a coil of between about 17 amino acids and about 23 amino acids in length; v) a beta strand-3 (β3) of between about 5 amino acids and about 7 amino acids in length; vi) a coil of between about 12 amino acids and about 14 amino acids in length; vii) a beta strand-4 (β4) of between about 5 amino acids and about 6 amino acids in length; viii) a coil of between about 2 amino acids and about 7 amino acids in length; ix) a beta strand-5 (β5) of between about 5 amino acids and about 7 amino acids in length; x) a coil of between about 26 amino acids and about 28 amino acids in length; xi) a beta strand-6 (β6) of between about 5 amino acids and about 7 amino acids in length; xii) a coil of between about 16 amino acids and about 20 amino acids in length; and xiii) a beta strand-1 (β7) of between about 13 amino acids and about 17 amino acids in length.

[0184] In some embodiments a PtIP-83 polypeptide comprises sequentially from the N-terminus to the C-terminus: a Region A of between about 200 to about 300 amino acids in length having a predominantly nonconserved secondary structure; a Region B of between about 380 to about 465 amino acids in length having a consensus secondary structure comprising sequentially: i) an alpha helix-1 of between about 10 and about 26 amino acids in length; ii) a coil-1 of between about 2 and about 8 amino acids in length flanked by alpha helix-1 and alpha helix-2; iii) an alpha helix-2 of between about 15 and about 24 amino acids in length; iv) a coil-2 of between about 4 and about 14 amino acids in length flanked by alpha helix-2 and alpha helix-3; v) an alpha helix 3 of between about 15 and about 27 amino acids in length; vi) a coil-3 of between about 11 and about 13 amino acids in length flanked by alpha helix-3 and alpha helix-4; vii) an alpha helix-4 of about 24 180 amino acids in length; viii) a coil-4 of between about 4 and about 5 amino acids in length flanked by alpha helix-4 and alpha helix-5; ix) an alpha helix-5 of between about 50 and about 54 amino acids in length; x) a coil-5 of between about 11 and about 17 amino acids in length flanked by alpha helix-5 and alpha helix-6; xi) an alpha helix-6 of between about 15 and about 16 amino acids in length; xii) a coil-6 of between about 6 and about 9 amino acids in length flanked by alpha helix-6 and alpha helix-7; xiii) an alpha helix-7 of between about 49 and about 55 amino acids in length; xiv) a coil-7 of between about 3 and about 8 amino acids in length flanked by alpha helix-7 and alpha helix-8; xv) an alpha helix-8 of between about 33 and about 36 amino acids in length; xvi) a coil-8 of between about 14 and about 16 amino acids in length flanked by alpha helix-8 and alpha helix-9; xvii) an alpha helix-9 of between about 16 and about 23 amino acids in length; xviii) a coil-9 of between about 21 and about 28 amino acids in length flanked by alpha helix-9 and Region C; and a Region C of between about 150 to about 180 amino acids in length having a consensus secondary structure comprising sequentially: i) a beta strand-1 (β1) of between about 3 amino acids and about 5 amino acids in length; ii) a coil of between about 13 amino acids and about 17 amino acids in length; iii) a beta strand-2 (β2) of between about 7 amino acids and about 11 amino acids in length; iv) a coil of between about 17 amino acids and about 23 amino acids in length; v) a beta strand-3 (β3) of between about 5 amino acids and about 7 amino acids in length; vi) a coil of between about 12 amino acids and about 14 amino acids in length; vii) a beta strand-4 (β4) of between about 5 amino acids and about 6 amino acids in length; viii) a coil of between about 2 amino acids and about 7 amino acids in length; ix) a beta strand-5 (β5) of between about 5 amino acids and about 7 amino acids in length; x) a coil of between about 26 amino acids and about 28 amino acids in length; xi) a beta strand-6 (β6) of between about 5 amino acids and about 7 amino acids in length; xii) a coil of between about 16 amino acids and about 20 amino acids in length; and xiii) a beta strand-1 (β7) of between about 13 amino acids and about 17 amino acids in length.

[0185] In some embodiments a PtIP-83 polypeptide comprises sequentially from the N-terminus to the C-terminus: a Region A of between about 200 to about 300 amino acids in length having a flexible consensus secondary structure, wherein the Region A comprises a conserved beta strand 1 (β1a) of between about 4 and about 12 amino acids in length within about amino acid residue 30 to about amino acid residue 130 from the N-terminus of the PtIP-83 polypeptide; a Region B of between about 380 to about 465 amino acids in length having a consensus secondary structure comprising sequentially: i) an alpha helix-1 of between about 10 and about 26 amino acids in length; ii) a coil-1 of between about 2 and about 8 amino acids in length flanked by alpha helix-1 and alpha helix-2; iii) an alpha helix-2 of between about 15 and about 24 amino acids in length; iv) a coil-2 of between about 4 and about 14 amino acids in length flanked by alpha helix-2 and alpha helix-3; v) an alpha helix 3 of between about 15 and about 27 amino acids in length; vi) a coil-3 of between about 11 and about 13 amino acids in length flanked by alpha helix-3 and alpha helix-4; vii) an alpha helix-4 of about 24 180 amino acids in length; viii) a coil-4 of between about 4 and about 5 amino acids in length flanked by alpha helix-4 and alpha helix-5; ix) an alpha helix-5 of between about 50 and about 54 amino acids in length; x) a coil-5 of between about 11 and about 17 amino acids in length flanked by alpha helix-5 and alpha helix-6; xi) an alpha helix-6 of between about 15 and about 16 amino acids in length; xii) a coil-6 of between about 6 and about 9 amino acids in length flanked by alpha helix-6 and alpha helix-7; xiii) an alpha helix-7 of between about 49 and about 55 amino acids in length; xiv) a coil-7 of between about 3 and about 8 amino acids in length flanked by alpha helix-7 and alpha helix-8; xv) an alpha helix-8 of between about 33 and about 36 amino acids in length; xvi) a coil-8 of between about 14 and about 16 amino acids in length flanked by alpha helix-8 and alpha helix-9; xvii) an alpha helix-9 of between about 16 and about 23 amino acids in length; xviii) a coil-9 of between about 21 and about 28 amino acids in length flanked by alpha helix-9 and Region C; and a Region C of between about 150 to about 180 amino acids in length having a consensus secondary structure comprising sequentially: i) a beta strand-1 (β1) of between about 3 amino acids and about 5 amino acids in length; ii) a coil of between about 13 amino acids and about 17 amino acids in length; iii) a beta strand-2 (β2) of between about 7 amino acids and about 11 amino acids in length; iv) a coil of between about 17 amino acids and about 23 amino acids in length; v) a beta strand-3 (β3) of between about 5 amino acids and about 7 amino acids in length; vi) a coil of between about 12 amino acids and about 14 amino acids in length; vii) a beta strand-4 (β4) of between about 5 amino acids and about 6 amino acids in length; viii) a coil of between about 2 amino acids and about 7 amino acids in length; ix) a beta strand-5 (β5) of between about 5 amino acids and about 7 amino acids in length; x) a coil of between about 26 amino acids and about 28 amino acids in length; xi) a beta strand-6 (β6) of between about 5 amino acids and about 7 amino acids in length; xii) a coil of between about 16 amino acids and about 20 amino acids in length; and xiii) a beta strand-1 (β7) of between about 13 amino acids and about 17 amino acids in length.

[0186] In some embodiments a PtIP-83 polypeptide has a calculated molecular weight of between about 70 kD and about 120 kD, between about 75 kD and about 110 kD, and between about 80 kD and about 105 kD, and between about 85 kD and about 105 kD.

[0187] In some embodiments the PtIP-83 polypeptide has a modified physical property. As used herein, the term “physical property” refers to any parameter suitable for describing the physical-chemical characteristics of a protein. As used herein, “physical property of interest” and “property of interest” are used interchangeably to refer to physical properties of proteins that are being investigated and/or modified. Examples of physical properties include, but are not limited to net surface charge and charge distribution on the protein surface, net hydrophobicity and hydrophobic residue distribution on the protein surface, surface charge density, surface hydrophobicity density, total count of surface ionizable groups, surface tension, protein size and its distribution in solution, melting temperature, heat capacity, and second virial coefficient. Examples of physical properties also include, but are not limited to solubility, folding, stability, and digestibility. In some embodiments the PtIP-83 polypeptide has increased digestibility of proteolytic fragments in an insect gut. Models for digestion by simulated gastric fluids are known to one skilled in the art (Fuchs, R. L. and J. D. Astwood. Food Technology 50: 83-88, 1996; Astwood, J. D., et al Nature Biotechnology 14: 1269-1273, 1996; Fu T J et al J. Agric Food Chem. 50: 7154-7160, 2002).

[0188] In some embodiments variants include polypeptides that differ in amino acid sequence due to mutagenesis. Variant proteins encompassed by the disclosure are biologically active, that is they continue to possess the desired biological activity (i.e. pesticidal activity) of the native protein. In some embodiment the variant will have at least about 10%, at least about 30%, at least about 50%, at least about 70%, at least about 80% or more of the insecticidal activity of the native protein. In some embodiments, the variants may have improved activity over the native protein.

[0189] Bacterial genes quite often possess multiple methionine initiation codons in proximity to the start of the open reading frame. Often, translation initiation at one or more of these start codons will lead to generation of a functional protein. These start codons can include ATG codons. However, bacteria such as Bacillus sp. also recognize the codon GTG as a start codon, and proteins that initiate translation at GTG codons contain a methionine at the first amino acid. On rare occasions, translation in bacterial systems can initiate at a TTG codon, though in this event the TTG encodes a methionine. Furthermore, it is not often determined a priori which of these codons are used naturally in the bacterium. Thus, it is understood that use of one of the alternate methionine codons may also lead to generation of pesticidal proteins. These pesticidal proteins are encompassed in the present disclosure and may be used in the methods of the present disclosure. It will be understood that, when expressed in plants, it will be necessary to alter the alternate start codon to ATG for proper translation.

[0190] In another aspect the PtIP-83 polypeptide may be expressed as a precursor protein with an intervening sequence that catalyzes multi-step, post translational protein splicing. Protein splicing involves the excision of an intervening sequence from a polypeptide with the concomitant joining of the flanking sequences to yield a new polypeptide (Chong, et al., (1996) J. Biol. Chem., 271:22159-22168). This intervening sequence or protein splicing element, referred to as inteins, which catalyze their own excision through three coordinated reactions at the N-terminal and C-terminal splice junctions: an acyl rearrangement of the N-terminal cysteine or serine; a transesterfication reaction between the two termini to form a branched ester or thioester intermediate and peptide bond cleavage coupled to cyclization of the intein C-terminal asparagine to free the intein (Evans, et al., (2000) J. Biol. Chem., 275:9091-9094. The elucidation of the mechanism of protein splicing has led to a number of intein-based applications (Comb, et al., U.S. Pat. No. 5,496,714; Comb, et al., U.S. Pat. No. 5,834,247; Camarero and Muir, (1999) J. Amer. Chem. Soc. 121:5597-5598; Chong, et al., (1997) Gene 192:271-281, Chong, et al., (1998) Nucleic Acids Res. 26:5109-5115; Chong, et al., (1998) J. Biol. Chem. 273:10567-10577; Cotton, et al., (1999) J. Am. Chem. Soc. 121:1100-1101; Evans, et al., (1999) J. Biol. Chem. 274:18359-18363; Evans, et al., (1999) J. Biol. Chem. 274:3923-3926; Evans, et al., (1998) Protein Sci. 7:2256-2264; Evans, et al., (2000) J. Biol. Chem. 275:9091-9094; Iwai and Pluckthun, (1999) FEBS Lett. 459:166-172; Mathys, et al., (1999) Gene 231:1-13; Mills, et al., (1998) Proc. Natl. Acad. Sci. USA 95:3543-3548; Muir, et al., (1998) Proc. Natl. Acad. Sci. USA 95:6705-6710; Otomo, et al., (1999) Biochemistry 38:16040-16044; Otomo, et al., (1999) J. Biolmol. NMR 14:105-114; Scott, et al., (1999) Proc. Natl. Acad. Sci. USA 96:13638-13643; Severinov and Muir, (1998) J. Biol. Chem. 273:16205-16209; Shingledecker, et al., (1998) Gene 207:187-195; Southworth, et al., (1998) EMBO J. 17:918-926; Southworth, et al., (1999) Biotechniques 27:110-120; Wood, et al., (1999) Nat. Biotechnol. 17:889-892; Wu, et al., (1998a) Proc. Natl. Acad. Sci. USA 95:9226-9231; Wu, et al., (1998b) Biochim Biophys Acta 1387:422-432; Xu, et al., (1999) Proc. Natl. Acad. Sci. USA 96:388-393; Yamazaki, et al., (1998) J. Am. Chem. Soc., 120:5591-5592). For the application of inteins in plant transgenes, see, Yang, et al., (Transgene Res 15:583-593 (2006)) and Evans, et al., (Annu. Rev. Plant Biol. 56:375-392 (2005)).

[0191] In another aspect the PtIP-83 polypeptide may be encoded by two separate genes where the intein of the precursor protein comes from the two genes, referred to as a split-intein, and the two portions of the precursor are joined by a peptide bond formation. This peptide bond formation is accomplished by intein-mediated trans-splicing. For this purpose, a first and a second expression cassette comprising the two separate genes further code for inteins capable of mediating protein trans-splicing. By trans-splicing, the proteins and polypeptides encoded by the first and second fragments may be linked by peptide bond formation. Trans-splicing inteins may be selected from the nucleolar and organellar genomes of different organisms including eukaryotes, archaebacteria and eubacteria. Inteins that may be used for are listed at neb.com/neb/inteins.html, which can be accessed on the world-wide web using the “www” prefix). The nucleotide sequence coding for an intein may be split into a 5′ and a 3′ part that code for the 5′ and the 3′ part of the intein, respectively. Sequence portions not necessary for intein splicing (e.g. homing endonuclease domain) may be deleted. The intein coding sequence is split such that the 5′ and the 3′ parts are capable of trans-splicing. For selecting a suitable splitting site of the intein coding sequence, the considerations published by Southworth, et al., (1998) EMBO J. 17:918-926 may be followed. In constructing the first and the second expression cassette, the 5′ intein coding sequence is linked to the 3′ end of the first fragment coding for the N-terminal part of the PtIP-83 polypeptide and the 3′ intein coding sequence is linked to the 5′ end of the second fragment coding for the C-terminal part of the PtIP-83 polypeptide.

[0192] In general, the trans-splicing partners can be designed using any split intein, including any naturally-occurring or artificially-split split intein. Several naturally-occurring split inteins are known, for example: the split intein of the DnaE gene of Synechocystis sp. PCC6803 (see, Wu, et al., (1998) Proc Natl Acad Sci USA. 95(16):9226-31 and Evans, et al., (2000) J Biol Chem. 275(13):9091-4 and of the DnaE gene from Nostoc punctiforme (see, Iwai, et al., (2006) FEBS Lett. 580(7):1853-8). Non-split inteins have been artificially split in the laboratory to create new split inteins, for example: the artificially split Ssp DnaB intein (see, Wu, et al., (1998) Biochim Biophys Acta. 1387:422-32) and split Sce VMA intein (see, Brenzel, et al., (2006) Biochemistry. 45(6):1571-8) and an artificially split fungal mini-intein (see, Elleuche, et al., (2007) Biochem Biophys Res Commun. 355(3):830-4). There are also intein databases available that catalogue known inteins (see for example the online-database available at: bioinformatics.weizmann.ac.il/\tilde{ }pietro/inteins/Inteinstable.html, which can be accessed on the world-wide web using the “www” prefix).

[0193] Naturally-occurring non-split inteins may have endonuclease or other enzymatic activities that can typically be removed when designing an artificially-split split intein. Such mini-inteins or minimized split inteins are well known in the art and are typically less than 200 amino acid residues long (see, Wu, et al., (1998) Biochim Biophys Acta. 1387:422-32). Suitable split inteins may have other purification enabling polypeptide elements added to their structure, provided that such elements do not inhibit the splicing of the split intein or are added in a manner that allows them to be removed prior to splicing. Protein splicing has been reported using proteins that comprise bacterial intein-like (BIL) domains (see, Amitai, et al., (2003) Mol Microbiol. 47:61-73) and hedgehog (Hog) auto-processing domains (the latter is combined with inteins when referred to as the Hog/intein superfamily or HINT family (see, Dassa, et al., (2004) J Biol Chem. 279:32001-7) and domains such as these may also be used to prepare artificially-split inteins. In particular, non-splicing members of such families may be modified by molecular biology methodologies to introduce or restore splicing activity in such related species. Recent studies demonstrate that splicing can be observed when a N-terminal split intein component is allowed to react with a C-terminal split intein component not found in nature to be its “partner”; for example, splicing has been observed utilizing partners that have as little as 30 to 50% homology with the “natural” splicing partner (see, Dassa, et al., (2007) Biochemistry. 46(1):322-30). Other such mixtures of disparate split intein partners have been shown to be unreactive one with another (see, Brenzel, et al., (2006) Biochemistry. 45(6):1571-8). However, it is within the ability of a person skilled in the relevant art to determine whether a particular pair of polypeptides is able to associate with each other to provide a functional intein, using routine methods and without the exercise of inventive skill.

[0194] In another aspect the PtIP-83 polypeptide is a circular permuted variant. In certain embodiments the PtIP-83 polypeptide is a circular permuted variant of the polypeptide of SEQ ID NO: 1, SEQ ID NO: 3, SEQ ID NO: 5, SEQ ID NO: 7, SEQ ID NO: 9, SEQ ID NO: 11, SEQ ID NO: 13, SEQ ID NO: 15, SEQ ID NO: 17, SEQ ID NO: 19, SEQ ID NO: 21, SEQ ID NO: 23, SEQ ID NO: 716, SEQ ID NO: 754, SEQ ID NO: 755, SEQ ID NO: 756, SEQ ID NO: 757, SEQ ID NO: 758, SEQ ID NO: 759, SEQ ID NO: 760, SEQ ID NO: 761, SEQ ID NO: 762, SEQ ID NO: 763, SEQ ID NO: 764, SEQ ID NO: 765, SEQ ID NO: 766, SEQ ID NO: 767, SEQ ID NO: 768, SEQ ID NO: 769, or SEQ ID NOs: 958-1026.

[0195] The development of recombinant DNA methods has made it possible to study the effects of sequence transposition on protein folding, structure and function. The approach used in creating new sequences resembles that of naturally occurring pairs of proteins that are related by linear reorganization of their amino acid sequences (Cunningham, et al. (1979) Proc. Natl. Acad. Sci. U.S.A. 76:3218-3222; Teather and Erfle, (1990) J. Bacteriol. 172:3837-3841; Schimming, et al., (1992) Eur. J. Biochem. 204:13-19; Yamiuchi and Minamikawa, (1991) FEBS Lett. 260:127-130; MacGregor, et al., (1996) FEBS Lett. 378:263-266). The first in vitro application of this type of rearrangement to proteins was described by Goldenberg and Creighton (J. Mol. Biol. 165:407-413, 1983). In creating a circular permuted variant a new N-terminus is selected at an internal site (breakpoint) of the original sequence, the new sequence having the same order of amino acids as the original from the breakpoint until it reaches an amino acid that is at or near the original C-terminus. At this point the new sequence is joined, either directly or through an additional portion of sequence (linker), to an amino acid that is at or near the original N-terminus and the new sequence continues with the same sequence as the original until it reaches a point that is at or near the amino acid that was N-terminal to the breakpoint site of the original sequence, this residue forming the new C-terminus of the chain. The length of the amino acid sequence of the linker can be selected empirically or with guidance from structural information or by using a combination of the two approaches. When no structural information is available, a small series of linkers can be prepared for testing using a design whose length is varied in order to span a range from 0 to 50 Å and whose sequence is chosen in order to be consistent with surface exposure (hydrophilicity, Hopp and Woods, (1983) Mol. Immunol. 20:483-489; Kyte and Doolittle, (1982) J. Mol. Biol. 157:105-132; solvent exposed surface area, Lee and Richards, (1971) J. Mol. Biol. 55:379-400) and the ability to adopt the necessary conformation without deranging the configuration of the pesticidal polypeptide (conformationally flexible; Karplus and Schulz, (1985) Naturwissenschaften 72:212-213). Assuming an average of translation of 2.0 to 3.8 Å per residue, this would mean the length to test would be between 0 to 30 residues, with 0 to 15 residues being the preferred range. Exemplary of such an empirical series would be to construct linkers using a cassette sequence such as Gly-Gly-Gly-Ser repeated n times, where n is 1, 2, 3 or 4. Those skilled in the art will recognize that there are many such sequences that vary in length or composition that can serve as linkers with the primary consideration being that they be neither excessively long nor short (cf., Sandhu, (1992) Critical Rev. Biotech. 12:437-462); if they are too long, entropy effects will likely destabilize the three-dimensional fold, and may also make folding kinetically impractical, and if they are too short, they will likely destabilize the molecule because of torsional or steric strain. Those skilled in the analysis of protein structural information will recognize that using the distance between the chain ends, defined as the distance between the c-alpha carbons, can be used to define the length of the sequence to be used or at least to limit the number of possibilities that must be tested in an empirical selection of linkers. They will also recognize that it is sometimes the case that the positions of the ends of the polypeptide chain are ill-defined in structural models derived from x-ray diffraction or nuclear magnetic resonance spectroscopy data, and that when true, this situation will therefore need to be taken into account in order to properly estimate the length of the linker required. From those residues whose positions are well defined are selected two residues that are close in sequence to the chain ends, and the distance between their c-alpha carbons is used to calculate an approximate length for a linker between them. Using the calculated length as a guide, linkers with a range of number of residues (calculated using 2 to 3.8 Å per residue) are then selected. These linkers may be composed of the original sequence, shortened or lengthened as necessary, and when lengthened the additional residues may be chosen to be flexible and hydrophilic as described above; or optionally the original sequence may be substituted for using a series of linkers, one example being the Gly-Gly-Gly-Ser cassette approach mentioned above; or optionally a combination of the original sequence and new sequence having the appropriate total length may be used. Sequences of pesticidal polypeptides capable of folding to biologically active states can be prepared by appropriate selection of the beginning (amino terminus) and ending (carboxyl terminus) positions from within the original polypeptide chain while using the linker sequence as described above. Amino and carboxyl termini are selected from within a common stretch of sequence, referred to as a breakpoint region, using the guidelines described below. A novel amino acid sequence is thus generated by selecting amino and carboxyl termini from within the same breakpoint region. In many cases the selection of the new termini will be such that the original position of the carboxyl terminus immediately preceded that of the amino terminus. However, those skilled in the art will recognize that selections of termini anywhere within the region may function, and that these will effectively lead to either deletions or additions to the amino or carboxyl portions of the new sequence. It is a central tenet of molecular biology that the primary amino acid sequence of a protein dictates folding to the three-dimensional structure necessary for expression of its biological function. Methods are known to those skilled in the art to obtain and interpret three-dimensional structural information using x-ray diffraction of single protein Crystals or nuclear magnetic resonance spectroscopy of protein solutions. Examples of structural information that are relevant to the identification of breakpoint regions include the location and type of protein secondary structure (alpha and 3-10 helices, parallel and anti-parallel beta sheets, chain reversals and turns, and loops; Kabsch and Sander, (1983) Biopolymers 22:2577-2637; the degree of solvent exposure of amino acid residues, the extent and type of interactions of residues with one another (Chothia, (1984) Ann. Rev. Biochem. 53:537-572) and the static and dynamic distribution of conformations along the polypeptide chain (Alber and Mathews, (1987) Methods Enzymol. 154:511-533). In some cases additional information is known about solvent exposure of residues; one example is a site of post-translational attachment of carbohydrate which is necessarily on the surface of the protein. When experimental structural information is not available or is not feasible to obtain, methods are also available to analyze the primary amino acid sequence in order to make predictions of protein tertiary and secondary structure, solvent accessibility and the occurrence of turns and loops. Biochemical methods are also sometimes applicable for empirically determining surface exposure when direct structural methods are not feasible; for example, using the identification of sites of chain scission following limited proteolysis in order to infer surface exposure (Gentile and Salvatore, (1993) Eur. J. Biochem. 218:603-621). Thus using either the experimentally derived structural information or predictive methods (e.g., Srinivisan and Rose, (1995) Proteins: Struct., Funct. & Genetics 22:81-99) the parental amino acid sequence is inspected to classify regions according to whether or not they are integral to the maintenance of secondary and tertiary structure. The occurrence of sequences within regions that are known to be involved in periodic secondary structure (alpha and 3-10 helices, parallel and anti-parallel beta sheets) are regions that should be avoided. Similarly, regions of amino acid sequence that are observed or PtIP- to have a low degree of solvent exposure are more likely to be part of the so-called hydrophobic core of the protein and should also be avoided for selection of amino and carboxyl termini. In contrast, those regions that are known or PtIP- to be in surface turns or loops, and especially those regions that are known not to be required for biological activity, are the preferred sites for location of the extremes of the polypeptide chain. Continuous stretches of amino acid sequence that are preferred based on the above criteria are referred to as a breakpoint region. Polynucleotides encoding circular permuted PtIP-83 polypeptides with new N-terminus/C-terminus which contain a linker region separating the original C-terminus and N-terminus can be made essentially following the method described in Mullins, et al., (1994) J. Am. Chem. Soc. 116:5529-5533. Multiple steps of polymerase chain reaction (PCR) amplifications are used to rearrange the DNA sequence encoding the primary amino acid sequence of the protein. Polynucleotides encoding circular permuted PtIP-83 polypeptides with new N-terminus/C-terminus which contain a linker region separating the original C-terminus and N-terminus can be made based on the tandem-duplication method described in Horlick, et al., (1992) Protein Eng. 5:427-431. Polymerase chain reaction (PCR) amplification of the new N-terminus/C-terminus genes is performed using a tandemly duplicated template DNA.

[0196] In another aspect fusion proteins are provided that include within its amino acid sequence an amino acid sequence comprising a PtIP-83 polypeptide including but not limited to the polypeptide of SEQ ID NO: 1, SEQ ID NO: 3, SEQ ID NO: 5, SEQ ID NO: 7, SEQ ID NO: 9, SEQ ID NO: 11, SEQ ID NO: 13, SEQ ID NO: 15, SEQ ID NO: 17, SEQ ID NO: 19, SEQ ID NO: 21, SEQ ID NO: 23, SEQ ID NO: 716, SEQ ID NO: 754, SEQ ID NO: 755, SEQ ID NO: 756, SEQ ID NO: 757, SEQ ID NO: 758, SEQ ID NO: 759, SEQ ID NO: 760, SEQ ID NO: 761, SEQ ID NO: 762, SEQ ID NO: 763, SEQ ID NO: 764, SEQ ID NO: 765, SEQ ID NO: 766, SEQ ID NO: 767, SEQ ID NO: 768, SEQ ID NO: 769, and active fragments thereof.

[0197] Methods for design and construction of fusion proteins (and polynucleotides encoding same) are known to those of skill in the art. Polynucleotides encoding a PtIP-83 polypeptide may be fused to signal sequences which will direct the localization of the PtIP-83 polypeptide to particular compartments of a prokaryotic or eukaryotic cell and/or direct the secretion of the PtIP-83 polypeptide of the embodiments from a prokaryotic or eukaryotic cell. For example, in E. coli, one may wish to direct the expression of the protein to the periplasmic space. Examples of signal sequences or proteins (or fragments thereof) to which the PtIP-83 polypeptide may be fused in order to direct the expression of the polypeptide to the periplasmic space of bacteria include, but are not limited to, the pelB signal sequence, the maltose binding protein (MBP) signal sequence, MBP, the ompA signal sequence, the signal sequence of the periplasmic E. coli heat-labile enterotoxin B-subunit and the signal sequence of alkaline phosphatase. Several vectors are commercially available for the construction of fusion proteins which will direct the localization of a protein, such as the pMAL series of vectors (particularly the pMAL-p series) available from New England Biolabs. In a specific embodiment, the PtIP-83 polypeptide may be fused to the pelB pectate lyase signal sequence to increase the efficiency of expression and purification of such polypeptides in Gram-negative bacteria (see, U.S. Pat. Nos. 5,576,195 and 5,846,818). Plant plastid transit peptide/polypeptide fusions are well known in the art (see, U.S. Pat. No. 7,193,133). Apoplast transit peptides such as rice or barley alpha-amylase secretion signal are also well known in the art. The plastid transit peptide is generally fused N-terminal to the polypeptide to be targeted (e.g., the fusion partner). In one embodiment, the fusion protein consists essentially of the plastid transit peptide and the PtIP-83 polypeptide to be targeted. In another embodiment, the fusion protein comprises the plastid transit peptide and the polypeptide to be targeted. In such embodiments, the plastid transit peptide is preferably at the N-terminus of the fusion protein. However, additional amino acid residues may be N-terminal to the plastid transit peptide providing that the fusion protein is at least partially targeted to a plastid. In a specific embodiment, the plastid transit peptide is in the N-terminal half, N-terminal third or N-terminal quarter of the fusion protein. Most or all of the plastid transit peptide is generally cleaved from the fusion protein upon insertion into the plastid. The position of cleavage may vary slightly between plant species, at different plant developmental stages, as a result of specific intercellular conditions or the particular combination of transit peptide/fusion partner used. In one embodiment, the plastid transit peptide cleavage is homogenous such that the cleavage site is identical in a population of fusion proteins. In another embodiment, the plastid transit peptide is not homogenous, such that the cleavage site varies by 1-10 amino acids in a population of fusion proteins. The plastid transit peptide can be recombinantly fused to a second protein in one of several ways. For example, a restriction endonuclease recognition site can be introduced into the nucleotide sequence of the transit peptide at a position corresponding to its C-terminal end and the same or a compatible site can be engineered into the nucleotide sequence of the protein to be targeted at its N-terminal end. Care must be taken in designing these sites to ensure that the coding sequences of the transit peptide and the second protein are kept “in frame” to allow the synthesis of the desired fusion protein. In some cases, it may be preferable to remove the initiator methionine codon of the second protein when the new restriction site is introduced. The introduction of restriction endonuclease recognition sites on both parent molecules and their subsequent joining through recombinant DNA techniques may result in the addition of one or more extra amino acids between the transit peptide and the second protein. This generally does not affect targeting activity as long as the transit peptide cleavage site remains accessible and the function of the second protein is not altered by the addition of these extra amino acids at its N-terminus. Alternatively, one skilled in the art can create a precise cleavage site between the transit peptide and the second protein (with or without its initiator methionine) using gene synthesis (Stemmer, et al., (1995) Gene 164:49-53) or similar methods. In addition, the transit peptide fusion can intentionally include amino acids downstream of the cleavage site. The amino acids at the N-terminus of the mature protein can affect the ability of the transit peptide to target proteins to plastids and/or the efficiency of cleavage following protein import. This may be dependent on the protein to be targeted. See, e.g., Comai, et al., (1988) J. Biol. Chem. 263(29):15104-9.

[0198] In some embodiments fusion proteins are provide comprising a PtIP-83 polypeptide and an insecticidal polypeptide joined by an amino acid linker. In some embodiments fusion proteins are provided represented by a formula selected from the group consisting of:

R¹-L-R²,R²-L-R¹,R¹—R² or R²—R¹

wherein R¹ is a PtIP-83 polypeptide, R² is a protein of interest. The R¹ polypeptide is fused either directly or through a linker (L) segment to the R² polypeptide. The term “directly” defines fusions in which the polypeptides are joined without a peptide linker. Thus “L” represents a chemical bound or polypeptide segment to which both R¹ and R² are fused in frame, most commonly L is a linear peptide to which R¹ and R² are bound by amide bonds linking the carboxy terminus of R¹ to the amino terminus of L and carboxy terminus of L to the amino terminus of R². By “fused in frame” is meant that there is no translation termination or disruption between the reading frames of R¹ and R². The linking group (L) is generally a polypeptide of between 1 and 500 amino acids in length. The linkers joining the two molecules are preferably designed to (1) allow the two molecules to fold and act independently of each other, (2) not have a propensity for developing an ordered secondary structure which could interfere with the functional domains of the two proteins, (3) have minimal hydrophobic or charged characteristic which could interact with the functional protein domains and (4) provide steric separation of R¹ and R² such that R¹ and R² could interact simultaneously with their corresponding receptors on a single cell. Typically surface amino acids in flexible protein regions include Gly, Asn and Ser. Virtually any permutation of amino acid sequences containing Gly, Asn and Ser would be expected to satisfy the above criteria for a linker sequence. Other neutral amino acids, such as Thr and Ala, may also be used in the linker sequence. Additional amino acids may also be included in the linkers due to the addition of unique restriction sites in the linker sequence to facilitate construction of the fusions.

[0199] In some embodiments the linkers comprise sequences selected from the group of formulas: (Gly₃Ser)ₙ, (Gly₄Ser)ₙ, (Gly₅Ser)ₙ, (GlyₙSer)ₙ or (AlaGlySer)ₙ where n is an integer. One example of a highly-flexible linker is the (GlySer)-rich spacer region present within the pIII protein of the filamentous bacteriophages, e.g. bacteriophages M13 or fd (Schaller, et al., 1975). This region provides a long, flexible spacer region between two domains of the pIII surface protein. Also included are linkers in which an endopeptidase recognition sequence is included. Such a cleavage site may be valuable to separate the individual components of the fusion to determine if they are properly folded and active in vitro. Examples of various endopeptidases include, but are not limited to, Plasmin, Enterokinase, Kallikerin, Urokinase, Tissue Plasminogen activator, clostripain, Chymosin, Collagenase, RusselI's Viper Venom Protease, Postproline cleavage enzyme, V8 protease, Thrombin and factor Xa. In some embodiments the linker comprises the amino acids EEKKN (SEQ ID NO: 37) from the multi-gene expression vehicle (MGEV), which is cleaved by vacuolar proteases as disclosed in US Patent Application Publication Number US 2007/0277263. In other embodiments, peptide linker segments from the hinge region of heavy chain immunoglobulins IgG, IgA, IgM, IgD or IgE provide an angular relationship between the attached polypeptides. Especially useful are those hinge regions where the cysteines are replaced with serines. Linkers of the present disclosure include sequences derived from murine IgG gamma 2b hinge region in which the cysteines have been changed to serines. The fusion proteins are not limited by the form, size or number of linker sequences employed and the only requirement of the linker is that functionally it does not interfere adversely with the folding and function of the individual molecules of the fusion.

[0200] In another aspect chimeric PtIP-83 polypeptides are provided that are created through joining two or more portions of PtIP-83 genes, which originally encoded separate PtIP-83 proteins to create a chimeric gene. The translation of the chimeric gene results in a single chimeric PtIP-83 polypeptide with regions, motifs or domains derived from each of the original polypeptides. In certain embodiments the chimeric protein comprises portions, motifs or domains of PtIP-83 polypeptides of SEQ ID NO: 1, SEQ ID NO: 3, SEQ ID NO: 5, SEQ ID NO: 7, SEQ ID NO: 9, SEQ ID NO: 11, SEQ ID NO: 13, SEQ ID NO: 15, SEQ ID NO: 17, SEQ ID NO: 19, SEQ ID NO: 21, SEQ ID NO: 23, SEQ ID NO: 716, SEQ ID NO: 754, SEQ ID NO: 755, SEQ ID NO: 756, SEQ ID NO: 757, SEQ ID NO: 758, SEQ ID NO: 759, SEQ ID NO: 760, SEQ ID NO: 761, SEQ ID NO: 762, SEQ ID NO: 763, SEQ ID NO: 764, SEQ ID NO: 765, SEQ ID NO: 766, SEQ ID NO: 767, SEQ ID NO: 768, SEQ ID NO: 769, or SEQ ID NOs: 958-1026, in any combination.

[0201] In one embodiment, a chimeric PtIP-83 polypeptide comprises an N-terminal fragment of about 100, about 200, about 300, or about 400 amino acids of a PtIP-83 polypeptide heterologous to the C-terminal region of the chimeric PtIP-83 polypeptide. In a further embodiment the N-terminal fragment comprises conserved regions from about amino acid 1-65; about amino acids 78-88; and/or about amino acids 242-292, wherein the boundaries of those regions may vary by about 10 amino acids. In some embodiments, the PtIP-83 polypeptide comprises an N-terminal fragment comprises a PtIP-83Aa (SEQ ID NO: 1) N-terminal fragment. In some embodiments, the PtIP-83 polypeptide comprises an N-terminal fragment comprises a PtIP-83Cb (SEQ ID NO: 7) N-terminal fragment. In certain embodiments, a chimeric PtIP-83 polypeptide comprising an N-terminal fragment of either PtIP-83Aa (SEQ ID NO: 1) or PtIP-83Cb (SEQ ID NO: 7) alters the site of action of the chimeric PtIP-83 polypeptide compared to the original C-terminal fragment of the chimeric PtIP-83 polypeptide in a heterologous binding assay.

[0202] It is recognized that DNA sequences may be altered by various methods, and that these alterations may result in DNA sequences encoding proteins with amino acid sequences different than that encoded by the wild-type (or native) pesticidal protein. In some embodiments a PtIP-83 polypeptide may be altered in various ways including amino acid substitutions, deletions, truncations and insertions of one or more amino acids, including up to 2, 3, 4, 5, 6, 7, 8, 9, 10, 15, 20, 25, 30, 35, 40, 45, 50, 55, 60, 65, 70, 75, 80, 85, 90, 100, 105, 110, 115, 120, 125, 130, 135, 140, 145 or more amino acid substitutions, deletions and/or insertions or combinations thereof compared to any one of SEQ ID NO: 1, SEQ ID NO: 3, SEQ ID NO: 5, SEQ ID NO: 7, SEQ ID NO: 9, SEQ ID NO: 11, SEQ ID NO: 13, SEQ ID NO: 15, SEQ ID NO: 17, SEQ ID NO: 19, SEQ ID NO: 21, SEQ ID NO: 23, SEQ ID NO: 716, SEQ ID NO: 754, SEQ ID NO: 755, SEQ ID NO: 756, SEQ ID NO: 757, SEQ ID NO: 758, SEQ ID NO: 759, SEQ ID NO: 760, SEQ ID NO: 761, SEQ ID NO: 762, SEQ ID NO: 763, SEQ ID NO: 764, SEQ ID NO: 765, SEQ ID NO: 766, SEQ ID NO: 767, SEQ ID NO: 768, SEQ ID NO: 769, or SEQ ID NOs: 958-1026.

[0203] In some embodiments a PtIP-83 polypeptide variant comprises one or more amino acid substitution, of Table 13, Table 14, Table 15, Table 16, Table17, Table 18, Table 20, Table 21, Table 23, Table 24 or combinations thereof, compared to the native amino acid of PtIP-83Aa (SEQ ID NO: 1) at the corresponding residue.

[0204] In some embodiments a PtIP-83 polypeptide variant is selected from but not limited to any one of SEQ ID NO: 236-299, SEQ ID NO: 334-367, SEQ ID NO: 398-427, SEQ ID NO: 518-607, and SEQ ID NO: 728-737.

[0205] In some embodiments a PtIP-83 polypeptide comprises a deletion of 1, 2, 3, 4, 5, 6, 7, 8, 9, 10, 11, 12, 13, 14, 15 or more amino acids from the N-terminus of the PtIP-83 polypeptide relative to the amino acid position of any one of SEQ ID NO: 1, SEQ ID NO: 3, SEQ ID NO: 5, SEQ ID NO: 7, SEQ ID NO: 9, SEQ ID NO: 11, SEQ ID NO: 13, SEQ ID NO: 15, SEQ ID NO: 17, SEQ ID NO: 19, SEQ ID NO: 21, SEQ ID NO: 23, SEQ ID NO: 716, SEQ ID NO: 754, SEQ ID NO: 755, SEQ ID NO: 756, SEQ ID NO: 757, SEQ ID NO: 758, SEQ ID NO: 759, SEQ ID NO: 760, SEQ ID NO: 761, SEQ ID NO: 762, SEQ ID NO: 763, SEQ ID NO: 764, SEQ ID NO: 765, SEQ ID NO: 766, SEQ ID NO: 767, SEQ ID NO: 768, SEQ ID NO: 769, or SEQ ID NOs: 958-1026.

[0206] In some embodiments a PtIP-83 polypeptide comprises a deletion of 1, 2, 3, 4, 5, 6, 7, 8, 9, 10, 11, 12, 13, 14, 15 or more amino acids from the C-terminus of the PtIP-83 polypeptide relative to the amino acid position of any one of SEQ ID NO: 1, SEQ ID NO: 3, SEQ ID NO: 5, SEQ ID NO: 7, SEQ ID NO: 9, SEQ ID NO: 11, SEQ ID NO: 13, SEQ ID NO: 15, SEQ ID NO: 17, SEQ ID NO: 19, SEQ ID NO: 21, SEQ ID NO: 23, SEQ ID NO: 716, SEQ ID NO: 754, SEQ ID NO: 755, SEQ ID NO: 756, SEQ ID NO: 757, SEQ ID NO: 758, SEQ ID NO: 759, SEQ ID NO: 760, SEQ ID NO: 761, SEQ ID NO: 762, SEQ ID NO: 763, SEQ ID NO: 764, SEQ ID NO: 765, SEQ ID NO: 766, SEQ ID NO: 767, SEQ ID NO: 768, SEQ ID NO: 769, or SEQ ID NOs: 958-1026.

[0207] Methods for such manipulations are generally known in the art. For example, amino acid sequence variants of a PtIP-83 polypeptide can be prepared by mutations in the DNA. This may also be accomplished by one of several forms of mutagenesis and/or in directed evolution. In some aspects, the changes encoded in the amino acid sequence will not substantially affect the function of the protein. Such variants will possess the desired pesticidal activity. However, it is understood that the ability of a PtIP-83 polypeptide to confer pesticidal activity may be improved by the use of such techniques upon the compositions of this disclosure.

[0208] For example, conservative amino acid substitutions may be made at one or more, PtIP-, nonessential amino acid residues. A “nonessential” amino acid residue is a residue that can be altered from the wild-type sequence of a PtIP-83 without altering the biological activity. A “conservative amino acid substitution” is one in which the amino acid residue is replaced with an amino acid residue having a similar side chain. Families of amino acid residues having similar side chains have been defined in the art. These families include: amino acids with basic side chains (e.g., lysine, arginine, histidine); acidic side chains (e.g., aspartic acid, glutamic acid); polar, negatively charged residues and their amides (e.g., aspartic acid, asparagine, glutamic, acid, glutamine; uncharged polar side chains (e.g., glycine, asparagine, glutamine, serine, threonine, tyrosine, cysteine); small aliphatic, nonpolar or slightly polar residues (e.g., Alanine, serine, threonine, proline, glycine); nonpolar side chains (e.g., alanine, valine, leucine, isoleucine, proline, phenylalanine, methionine, tryptophan); large aliphatic, nonpolar residues (e.g., methionine, leucine, isoleucine, valine, cystine); beta-branched side chains (e.g., threonine, valine, isoleucine); aromatic side chains (e.g., tyrosine, phenylalanine, tryptophan, histidine); large aromatic side chains (e.g., tyrosine, phenylalanine, tryptophan).

[0209] Amino acid substitutions may be made in nonconserved regions that retain function. In general, such substitutions would not be made for conserved amino acid residues or for amino acid residues residing within a conserved motif, where such residues are essential for protein activity. Examples of residues that are conserved and that may be essential for protein activity include, for example, residues that are identical between all proteins contained in an alignment of similar or related toxins to the sequences of the embodiments (e.g., residues that are identical in an alignment of homologous proteins). Examples of residues that are conserved but that may allow conservative amino acid substitutions and still retain activity include, for example, residues that have only conservative substitutions between all proteins contained in an alignment of similar or related toxins to the sequences of the embodiments (e.g., residues that have only conservative substitutions between all proteins contained in the alignment homologous proteins). However, one of skill in the art would understand that functional variants may have minor conserved or nonconserved alterations in the conserved residues. Guidance as to appropriate amino acid substitutions that do not affect biological activity of the protein of interest may be found in the model of Dayhoff, et al., (1978) Atlas of Protein Sequence and Structure (Natl. Biomed. Res. Found., Washington, D.C.), herein incorporated by reference. In making such changes, the hydropathic index of amino acids may be considered. The importance of the hydropathic amino acid index in conferring interactive biologic function on a protein is generally understood in the art (Kyte and Doolittle, (1982) J Mol Biol. 157(1):105-32). It is accepted that the relative hydropathic character of the amino acid contributes to the secondary structure of the resultant protein, which in turn defines the interaction of the protein with other molecules, for example, enzymes, substrates, receptors, DNA, antibodies, antigens, and the like.

[0210] It is known in the art that certain amino acids may be substituted by other amino acids having a similar hydropathic index or score and still result in a protein with similar biological activity, i.e., still obtain a biological functionally equivalent protein. Each amino acid has been assigned a hydropathic index on the basis of its hydrophobicity and charge characteristics (Kyte and Doolittle, ibid). These are: isoleucine (+4.5); valine (+4.2); leucine (+3.8); phenylalanine (+2.8); cysteine/cystine (+2.5); methionine (+1.9); alanine (+1.8); glycine (−0.4); threonine (−0.7); serine (−0.8); tryptophan (−0.9); tyrosine (−1.3); proline (−1.6); histidine (−3.2); glutamate (−3.5); glutamine (−3.5); aspartate (−3.5); asparagine (−3.5); lysine (−3.9) and arginine (−4.5). In making such changes, the substitution of amino acids whose hydropathic indices are within +2 is preferred, those which are within +1 are particularly preferred, and those within +0.5 are even more particularly preferred.

[0211] It is also understood in the art that the substitution of like amino acids can be made effectively on the basis of hydrophilicity. U.S. Pat. No. 4,554,101, states that the greatest local average hydrophilicity of a protein, as governed by the hydrophilicity of its adjacent amino acids, correlates with a biological property of the protein.

As detailed in U.S. Pat. No. 4,554,101, the following hydrophilicity values have been assigned to amino acid residues: arginine (+3.0); lysine (+3.0); aspartate (+3.0.+0.1); glutamate (+3.0.+0.1); serine (+0.3); asparagine (+0.2); glutamine (+0.2); glycine (0); threonine (−0.4); proline (−0.5.+0.1); alanine (−0.5); histidine (−0.5); cysteine (−1.0); methionine (−1.3); valine (−1.5); leucine (−1.8); isoleucine (−1.8); tyrosine (−2.3); phenylalanine (−2.5); tryptophan (−3.4).

[0212] Alternatively, alterations may be made to the protein sequence of many proteins at the amino or carboxy terminus without substantially affecting activity. This can include insertions, deletions or alterations introduced by modern molecular methods, such as PCR, including PCR amplifications that alter or extend the protein coding sequence by virtue of inclusion of amino acid encoding sequences in the oligonucleotides utilized in the PCR amplification. Alternatively, the protein sequences added can include entire protein-coding sequences, such as those used commonly in the art to generate protein fusions. Such fusion proteins are often used to (1) increase expression of a protein of interest (2) introduce a binding domain, enzymatic activity or epitope to facilitate either protein purification, protein detection or other experimental uses known in the art (3) target secretion or translation of a protein to a subcellular organelle, such as the periplasmic space of Gram-negative bacteria, mitochondria or chloroplasts of plants or the endoplasmic reticulum of eukaryotic cells, the latter of which often results in glycosylation of the protein.

[0213] Variant nucleotide and amino acid sequences of the disclosure also encompass sequences derived from mutagenic and recombinogenic procedures such as DNA shuffling. With such a procedure, one or more different PtIP-83 polypeptide coding regions can be used to create a new PtIP-83 polypeptide possessing the desired properties. In this manner, libraries of recombinant polynucleotides are generated from a population of related sequence polynucleotides comprising sequence regions that have substantial sequence identity and can be homologously recombined in vitro or in vivo. For example, using this approach, sequence motifs encoding a domain of interest may be shuffled between a pesticidal gene and other known pesticidal genes to obtain a new gene coding for a protein with an improved property of interest, such as an increased insecticidal activity. Strategies for such DNA shuffling are known in the art. See, for example, Stemmer, (1994) Proc. Natl. Acad. Sci. USA 91:10747-10751; Stemmer, (1994) Nature 370:389-391; Crameri, et al., (1997) Nature Biotech. 15:436-438; Moore, et al., (1997) J. Mol. Biol. 272:336-347; Zhang, et al., (1997) Proc. Natl. Acad. Sci. USA 94:4504-4509; Crameri, et al., (1998) Nature 391:288-291; and U.S. Pat. Nos. 5,605,793 and 5,837,458.

[0214] Domain swapping or shuffling is another mechanism for generating altered PtIP-83 polypeptides. Domains may be swapped between PtIP-83 polypeptides resulting in hybrid or chimeric toxins with improved insecticidal activity or target spectrum. Methods for generating recombinant proteins and testing them for pesticidal activity are well known in the art (see, for example, Naimov, et al., (2001) Appl. Environ. Microbiol. 67:5328-5330; de Maagd, et al., (1996) Appl. Environ. Microbiol. 62:1537-1543; Ge, et al., (1991) J. Biol. Chem. 266:17954-17958; Schnepf, et al., (1990) J. Biol. Chem. 265:20923-20930; Rang, et al., 91999) Appl. Environ. Microbiol. 65:2918-2925).

[0215] Alignment of PtIP-83 homologs (FIG. 2) allows for identification of residues that are highly conserved among natural homologs in this family.

[0216] In some embodiments PtIP-83 polypeptides are provided comprising an amino acid sequence having at least 80%, at least 85%, at least 90%, at least 95%, at least 96%, at least 97%, at least 98% or at least 99% sequence identity to any one of SEQ ID NO: 786-888.

[0217] In some embodiments PtIP-83 polypeptides are provide comprising the amino acid sequence of any one of SEQ ID NO: 786-888.

[0218] In some embodiments the PtIP-83 polypeptide is not the amino acid sequence of any one of SEQ ID NO: 786-888.

### Compositions

[0219] Compositions comprising a PtIP-83 polypeptide of the disclosure are also embraced. In some embodiments the composition comprises a PtIP-83 polypeptide of SEQ ID NO: 1, SEQ ID NO: 3, SEQ ID NO: 5, SEQ ID NO: 7, SEQ ID NO: 9, SEQ ID NO: 11, SEQ ID NO: 13, SEQ ID NO: 15, SEQ ID NO: 17, SEQ ID NO: 19, SEQ ID NO: 21, SEQ ID NO: 23, SEQ ID NO: 716, SEQ ID NO: 754, SEQ ID NO: 755, SEQ ID NO: 756, SEQ ID NO: 757, SEQ ID NO: 758, SEQ ID NO: 759, SEQ ID NO: 760, SEQ ID NO: 761, SEQ ID NO: 762, SEQ ID NO: 763, SEQ ID NO: 764, SEQ ID NO: 765, SEQ ID NO: 766, SEQ ID NO: 767, SEQ ID NO: 768, SEQ ID NO: 769, or SEQ ID NOs: 958-1026 or a variant thereof. In some embodiments the composition comprises a PtIP-83 fusion protein.

[0220] In some embodiments compositions are provided comprising a PtIP-83 polypeptide comprising an amino acid sequence of any one of SEQ ID NO: 236-299, SEQ ID NO: 334-367, SEQ ID NO: 398-427, SEQ ID NO: 518-607, SEQ ID NO: 640-645, and SEQ ID NO: 728-737 or a variant thereof.

[0221] In some embodiments compositions are provide comprising a PtIP-83 polypeptide comprising the amino acid sequence of any one of SEQ ID NO: 786-888 or a variant thereof.

[0222] In some embodiments agricultural compositions of PtIP-83 polypeptides are disclosed. In the embodiments, a transformed microorganism (which includes whole organisms, cells, spore(s), PtIP-83 polypeptide(s), pesticidal component(s), pest-impacting component(s), variant(s), living or dead cells and cell components, including mixtures of living and dead cells and cell components, and including broken cells and cell components) or an isolated PtIP-83 polypeptide(s) can be formulated with an acceptable carrier into a pesticidal composition(s) that is, for example, a suspension, a solution, an emulsion, a dusting powder, a dispersible granule or pellet, a wettable powder, and an emulsifiable concentrate, an aerosol or spray, an impregnated granule, an adjuvant, a coatable paste, a colloid, and also encapsulations in, for example, polymer substances. Such formulated compositions may be prepared by such conventional means as desiccation, lyophilization, homogenization, extraction, filtration, centrifugation, sedimentation, or concentration of a culture of cells comprising the polypeptide.

[0223] Such compositions disclosed above may be obtained by the addition of a surface-active agent, an inert carrier, a preservative, a humectant, a feeding stimulant, an attractant, an encapsulating agent, a binder, an emulsifier, a dye, a UV protectant, a buffer, a flow agent or fertilizers, micronutrient donors, or other preparations that influence plant growth. One or more agrochemicals including, but not limited to, herbicides, insecticides, fungicides, bactericides, nematocides, molluscicides, acaricides, plant growth regulators, harvest aids, and fertilizers, can be combined with carriers, surfactants or adjuvants customarily employed in the art of formulation or other components to facilitate product handling and application for particular target pests. Suitable carriers and adjuvants can be solid or liquid and correspond to the substances ordinarily employed in formulation technology, e.g., natural or regenerated mineral substances, solvents, dispersants, wetting agents, tackifiers, binders, or fertilizers. The active ingredients of the embodiments are normally applied in the form of compositions and can be applied to the crop area, plant, or seed to be treated. For example, the compositions of the embodiments may be applied to grain in preparation for or during storage in a grain bin or silo, etc. The compositions of the embodiments may be applied simultaneously or in succession with other compounds. Methods of applying an active ingredient of the embodiments or an agrochemical composition of the embodiments that contains at least one of the Cyt1A variant polypeptides produced by the bacterial strains of the embodiments include, but are not limited to, foliar application, seed coating, and soil application. The number of applications and the rate of application depend on the intensity of infestation by the corresponding pest.

[0224] Suitable surface-active agents include, but are not limited to, anionic compounds such as a carboxylate of, for example, a metal; a carboxylate of a long chain fatty acid; an N-acylsarcosinate; mono or di-esters of phosphoric acid with fatty alcohol ethoxylates or salts of such esters; fatty alcohol sulfates such as sodium dodecyl sulfate, sodium octadecyl sulfate or sodium cetyl sulfate; ethoxylated fatty alcohol sulfates; ethoxylated alkylphenol sulfates; lignin sulfonates; petroleum sulfonates; alkyl aryl sulfonates such as alkyl-benzene sulfonates or lower alkylnaphtalene sulfonates, e.g., butyl-naphthalene sulfonate; salts of sulfonated naphthalene-formaldehyde condensates; salts of sulfonated phenol-formaldehyde condensates; more complex sulfonates such as the amide sulfonates, e.g., the sulfonated condensation product of oleic acid and N-methyl taurine; or the dialkyl sulfosuccinates, e.g., the sodium sulfonate of dioctyl succinate. Non-ionic agents include condensation products of fatty acid esters, fatty alcohols, fatty acid amides or fatty-alkyl- or alkenyl-substituted phenols with ethylene oxide, fatty esters of polyhydric alcohol ethers, e.g., sorbitan fatty acid esters, condensation products of such esters with ethylene oxide, e.g., polyoxyethylene sorbitar fatty acid esters, block copolymers of ethylene oxide and propylene oxide, acetylenic glycols such as 2,4,7,9-tetraethyl-5-decyn-4,7-diol, or ethoxylated acetylenic glycols. Examples of a cationic surface-active agent include, for instance, an aliphatic mono-, di-, or polyamine such as an acetate, naphthenate or oleate; or oxygen-containing amine such as an amine oxide of polyoxyethylene alkylamine; an amide-linked amine prepared by the condensation of a carboxylic acid with a di- or polyamine; or a quaternary ammonium salt.

[0225] Examples of inert materials include but are not limited to inorganic minerals such as kaolin, phyllosilicates, carbonates, sulfates, phosphates, Mica, Amorphous Silica Gel, talc, clay, volcanic ash or botanical materials such as cork, powdered corncobs, peanut hulls, rice hulls, and walnut shells. Kaolins such as kaolinite, dickite, nacrite, anauxite, halloysite and endellite are useful as carrier materials. Montmorillonites, such as beidellite, nontronite, montmorillonite, hectorite, saponite, sauconite and bentonite are useful as carrier materials. Vermiculites such as biotite are useful as carrier materials.

[0226] The compositions of the embodiments can be in a suitable form for direct application or as a concentrate of primary composition that requires dilution with a suitable quantity of water or other diluent before application. The pesticidal concentration will vary depending upon the nature of the particular formulation, specifically, whether it is a concentrate or to be used directly. The composition contains 1 to 98% of a solid or liquid inert carrier, and 0 to 50% or 0.1 to 50% of a surfactant. These compositions will be administered at the labeled rate for the commercial product, for example, about 0.01 lb-5.0 lb. per acre when in dry form and at about 0.01 pts.-10 pts. per acre when in liquid form.

### Antibodies

[0227] Antibodies to a PtIP-83 polypeptide of the embodiments or to variants or fragments thereof are also encompassed. The antibodies of the disclosure include polyclonal and monoclonal antibodies as well as fragments thereof which retain their ability to bind to PtIP-83 polypeptide found in the insect gut. An antibody, monoclonal antibody or fragment thereof is said to be capable of binding a molecule if it is capable of specifically reacting with the molecule to thereby bind the molecule to the antibody, monoclonal antibody or fragment thereof. The term “antibody” (Ab) or “monoclonal antibody” (Mab) is meant to include intact molecules as well as fragments or binding regions or domains thereof (such as, for example, Fab and F(ab).sub.2 fragments) which are capable of binding hapten. Such fragments are typically produced by proteolytic cleavage, such as papain or pepsin. Alternatively, hapten-binding fragments can be produced through the application of recombinant DNA technology or through synthetic chemistry. Methods for the preparation of the antibodies of the present disclosure are generally known in the art. For example, see, Antibodies, A Laboratory Manual, Ed Harlow and David Lane (eds.) Cold Spring Harbor Laboratory, N.Y. (1988), as well as the references cited therein. Standard reference works setting forth the general principles of immunology include: Klein, J. Immunology: The Science of Cell-Noncell Discrimination, John Wiley & Sons, N.Y. (1982); Dennett, et al., Monoclonal Antibodies, Hybridoma: A New Dimension in Biological Analyses, Plenum Press, N.Y. (1980) and Campbell, “Monoclonal Antibody Technology,” In Laboratory Techniques in Biochemistry and Molecular Biology, Vol. 13, Burdon, et al., (eds.), Elsevier, Amsterdam (1984). See also, U.S. Pat. Nos. 4,196,265; 4,609,893; 4,713,325; 4,714,681; 4,716,111; 4,716,117 and 4,720,459. PtIP-83 polypeptide antibodies or antigen-binding portions thereof can be produced by a variety of techniques, including conventional monoclonal antibody methodology, for example the standard somatic cell hybridization technique of Kohler and Milstein, (1975) Nature 256:495. Other techniques for producing monoclonal antibody can also be employed such as viral or oncogenic transformation of B lymphocytes. An animal system for preparing hybridomas is a murine system. Immunization protocols and techniques for isolation of immunized splenocytes for fusion are known in the art. Fusion partners (e.g., murine myeloma cells) and fusion procedures are also known. The antibody and monoclonal antibodies of the disclosure can be prepared by utilizing a PtIP-83 polypeptide as antigens.

[0228] A kit for detecting the presence of a PtIP-83 polypeptide or detecting the presence of a nucleotide sequence encoding a PtIP-83 polypeptide in a sample is provided. In one embodiment, the kit provides antibody-based reagents for detecting the presence of a PtIP-83 polypeptide in a tissue sample. In another embodiment, the kit provides labeled nucleic acid probes useful for detecting the presence of one or more polynucleotides encoding PtIP-83 polypeptide. The kit is provided along with appropriate reagents and controls for carrying out a detection method, as well as instructions for use of the kit.

### Receptor Identification and Isolation

[0229] Receptors to the PtIP-83 polypeptide of the embodiments or to variants or fragments thereof, are also encompassed. Methods for identifying receptors are well known in the art (see, Hofmann, et. al., (1988) Eur. J. Biochem. 173:85-91; Gill, et al., (1995) J. Biol. Chem. 27277-27282) can be employed to identify and isolate the receptor that recognizes the PtIP-83 polypeptide using the brush-border membrane vesicles from susceptible insects. In addition to the radioactive labeling method listed in the cited literatures, PtIP-83 polypeptide can be labeled with fluorescent dye and other common labels such as streptavidin. Brush-border membrane vesicles (BBMV) of susceptible insects such as soybean looper and stink bugs can be prepared according to the protocols listed in the references and separated on SDS-PAGE gel and blotted on suitable membrane. Labeled PtIP-83 polypeptide can be incubated with blotted membrane of BBMV and labeled the PtIP-83 polypeptide can be identified with the labeled reporters. Identification of protein band(s) that interact with the PtIP-83 polypeptide can be detected by N-terminal amino acid gas phase sequencing or mass spectrometry based protein identification method (Patterson, (1998) 10.22, 1-24, Current Protocol in Molecular Biology published by John Wiley & Son Inc). Once the protein is identified, the corresponding gene can be cloned from genomic DNA or cDNA library of the susceptible insects and binding affinity can be measured directly with the PtIP-83 polypeptide. Receptor function for insecticidal activity by the PtIP-83 polypeptide can be verified by accomplished by RNAi type of gene knock out method (Rajagopal, et al., (2002) J. Biol. Chem. 277:46849-46851).

### Nucleotide Constructs, Expression Cassettes and Vectors

[0230] The use of the term “nucleotide constructs” herein is not intended to limit the embodiments to nucleotide constructs comprising DNA. Those of ordinary skill in the art will recognize that nucleotide constructs particularly polynucleotides and oligonucleotides composed of ribonucleotides and combinations of ribonucleotides and deoxyribonucleotides may also be employed in the methods disclosed herein. The nucleotide constructs, nucleic acids, and nucleotide sequences of the embodiments additionally encompass all complementary forms of such constructs, molecules, and sequences. Further, the nucleotide constructs, nucleotide molecules, and nucleotide sequences of the embodiments encompass all nucleotide constructs, molecules, and sequences which can be employed in the methods of the embodiments for transforming plants including, but not limited to, those comprised of deoxyribonucleotides, ribonucleotides, and combinations thereof. Such deoxyribonucleotides and ribonucleotides include both naturally occurring molecules and synthetic analogues. The nucleotide constructs, nucleic acids, and nucleotide sequences of the embodiments also encompass all forms of nucleotide constructs including, but not limited to, single-stranded forms, double-stranded forms, hairpins, stem-and-loop structures and the like.

A further embodiment relates to a transformed organism such as an organism selected from plant and insect cells, bacteria, yeast, baculovirus, protozoa, nematodes and algae. The transformed organism comprises a DNA molecule of the embodiments, an expression cassette comprising the DNA molecule or a vector comprising the expression cassette, which may be stably incorporated into the genome of the transformed organism.

[0231] In some embodiments transgenic host cells are provide transformed with a polynucleotide encoding a PtIP-83 polypeptide of the disclosure. In some embodiments the host cell is a plant cell. In some embodiments the host cell is a bacteria.

The sequences of the embodiments are provided in DNA constructs for expression in the organism of interest. The construct will include 5′ and 3′ regulatory sequences operably linked to a sequence of the embodiments. The term “operably linked” as used herein refers to a functional linkage between a promoter and a second sequence, wherein the promoter sequence initiates and mediates transcription of the DNA sequence corresponding to the second sequence. Generally, operably linked means that the nucleic acid sequences being linked are contiguous and where necessary to join two protein coding regions in the same reading frame. The construct may additionally contain at least one additional gene to be cotransformed into the organism. Alternatively, the additional gene(s) can be provided on multiple DNA constructs.

[0232] Such a DNA construct is provided with a plurality of restriction sites for insertion of the PtIP-83 polypeptide gene sequence to be under the transcriptional regulation of the regulatory regions. The DNA construct may additionally contain selectable marker genes. The DNA construct will generally include in the 5′ to 3′ direction of transcription: a transcriptional and translational initiation region (i.e., a promoter), a DNA sequence of the embodiments, and a transcriptional and translational termination region (i.e., termination region) functional in the organism serving as a host. The transcriptional initiation region (i.e., the promoter) may be native, analogous, foreign or heterologous to the host organism and/or to the sequence of the embodiments. Additionally, the promoter may be the natural sequence or alternatively a synthetic sequence. The term “foreign” as used herein indicates that the promoter is not found in the native organism into which the promoter is introduced. Where the promoter is “foreign” or “heterologous” to the sequence of the embodiments, it is intended that the promoter is not the native or naturally occurring promoter for the operably linked sequence of the embodiments. As used herein, a chimeric gene comprises a coding sequence operably linked to a transcription initiation region that is heterologous to the coding sequence. Where the promoter is a native or natural sequence, the expression of the operably linked sequence is altered from the wild-type expression, which results in an alteration in phenotype.

[0233] In some embodiments the DNA construct may also include a transcriptional enhancer sequence. As used herein, the term an “enhancer” refers to a DNA sequence which can stimulate promoter activity, and may be an innate element of the promoter or a heterologous element inserted to enhance the level or tissue-specificity of a promoter. Various enhancers are known in the art including for example, introns with gene expression enhancing properties in plants (US Patent Application Publication Number 2009/0144863, the ubiquitin intron (i.e., the maize ubiquitin intron 1 (see, for example, NCBI sequence S94464)), the omega enhancer or the omega prime enhancer (Gallie, et al., (1989) Molecular Biology of RNA ed. Cech (Liss, New York) 237-256 and Gallie, et al., (1987) Gene 60:217-25), the CaMV 35S enhancer (see, e.g., Benfey, et al., (1990) EMBO J. 9:1685-96) and the enhancers of U.S. Pat. No. 7,803,992 may also be used, each of which is incorporated by reference. The above list of transcriptional enhancers is not meant to be limiting. Any appropriate transcriptional enhancer can be used in the embodiments.

[0234] The termination region may be native with the transcriptional initiation region, may be native with the operably linked DNA sequence of interest, may be native with the plant host or may be derived from another source (i.e., foreign or heterologous to the promoter, the sequence of interest, the plant host or any combination thereof).

[0235] Convenient termination regions are available from the Ti-plasmid of A. tumefaciens, such as the octopine synthase and nopaline synthase termination regions. In one embodiment, the terminator is the ubiquitin 14 terminator (Callis, J. et al. (1995) Genetics 139, 921-39). See also, Guerineau, et al., (1991) Mol. Gen. Genet. 262:141-144; Proudfoot, (1991) Cell 64:671-674; Sanfacon, et al., (1991) Genes Dev. 5:141-149; Mogen, et al., (1990) Plant Cell 2:1261-1272; Munroe, et al., (1990) Gene 91:151-158; Ballas, et al., (1989) Nucleic Acids Res. 17:7891-7903 and Joshi, et al., (1987) Nucleic Acid Res. 15:9627-9639.

[0236] Where appropriate, a nucleic acid may be optimized for increased expression in the host organism. Thus, where the host organism is a plant, the synthetic nucleic acids can be synthesized using plant-preferred codons for improved expression. See, for example, Campbell and Gowri, (1990) Plant Physiol. 92:1-11 for a discussion of host-preferred codon usage. For example, although nucleic acid sequences of the embodiments may be expressed in both monocotyledonous and dicotyledonous plant species, sequences can be modified to account for the specific codon preferences and GC content preferences of monocotyledons or dicotyledons as these preferences have been shown to differ (Murray et al. (1989) Nucleic Acids Res. 17:477-498). Thus, the maize-preferred codon for a particular amino acid may be derived from known gene sequences from maize. Maize codon usage for 28 genes from maize plants is listed in Table 4 of Murray, et al., supra. Methods are available in the art for synthesizing plant-preferred genes. See, for example, Murray, et al., (1989) Nucleic Acids Res. 17:477-498, and Liu H et al. Mol Bio Rep 37:677-684, 2010, herein incorporated by reference. A Zea maize codon usage table can be also found at kazusa.or.jp/codon/cgi-bin/showcodon.cgi?species=4577, which can be accessed using the www prefix. Table 3 shows a maize optimal codon analysis (adapted from Liu H et al. Mol Bio Rep 37:677-684, 2010).

TABLE 3

| Amino | | High | | Low | | Amino | | High | | Low | |
|---|---|---|---|---|---|---|---|---|---|---|---|
| Acid | Codon | Count | RSCU | Count | RSCU | Acid | Codon | Count | RSCU | Count | RSCU |
| Phe | UUU | 115 | 0.04 | 2,301 | 1.22 | Ala | GCU | 629 | 0.17 | 3,063 | 1.59 |
| | UUC* | 5,269 | 1.96 | 1,485 | 0.78 | | GCC* | 8,057 | 2.16 | 1,136 | 0.59 |
| Ser | UCU | 176 | 0.13 | 2,498 | 1.48 | | GCA | 369 | 0.1 | 2,872 | 1.49 |
| | UCC* | 3,489 | 2.48 | 1,074 | 0.63 | | GCG* | 5,835 | 1.57 | 630 | 0.33 |
| | UCA | 104 | 0.07 | 2,610 | 1.54 | Tyr | UAU | 71 | 0.04 | 1,632 | 1.22 |
| | UCG* | 1,975 | 1.4 | 670 | 0.4 | | UAC* | 3,841 | 1.96 | 1,041 | 0.78 |
| | AGU | 77 | 0.05 | 1,788 | 1.06 | His | CAU | 131 | 0.09 | 1,902 | 1.36 |
| | AGC* | 2,617 | 1.86 | 1,514 | 0.89 | | CAC* | 2,800 | 1.91 | 897 | 0.64 |
| Leu | UUA | 10 | 0.01 | 1,326 | 0.79 | Cys | UGU | 52 | 0.04 | 1,233 | 1.12 |
| | UUG | 174 | 0.09 | 2,306 | 1.37 | | UGC* | 2,291 | 1.96 | 963 | 0.88 |
| | CUU | 223 | 0.11 | 2,396 | 1.43 | Gln | CAA | 99 | 0.05 | 2,312 | 1.04 |
| | CUC* | 5,979 | 3.08 | 1,109 | 0.66 | | CAG* | 3,557 | 1.95 | 2,130 | 0.96 |
| | CUA | 106 | 0.05 | 1,280 | 0.76 | Arg | CGU | 153 | 0.12 | 751 | 0.74 |
| | CUG* | 5,161 | 2.66 | 1,646 | 0.98 | | CGC* | 4,278 | 3.25 | 466 | 0.46 |
| Pro | CCU | 427 | 0.22 | 1,900 | 1.47 | | CGA | 92 | 0.07 | 659 | 0.65 |
| | CCC* | 3,035 | 1.59 | 601 | 0.47 | | CGG* | 1,793 | 1.36 | 631 | 0.62 |
| | CCA | 311 | 0.16 | 2,140 | 1.66 | | AGA | 83 | 0.06 | 1,948 | 1.91 |
| | CCG* | 3,846 | 2.02 | 513 | 0.4 | | AGG* | 1,493 | 1.14 | 1,652 | 1.62 |
| Ile | AUU | 138 | 0.09 | 2,388 | 1.3 | Asn | AAU | 131 | 0.07 | 3,074 | 1.26 |
| | AUC* | 4,380 | 2.85 | 1,353 | 0.74 | | AAC* | 3,814 | 1.93 | 1,807 | 0.74 |
| | AUA | 88 | 0.06 | 1,756 | 0.96 | Lys | AAA | 130 | 0.05 | 3,215 | 0.98 |
| Thr | ACU | 136 | 0.09 | 1,990 | 1.43 | | AAG* | 5,047 | 1.95 | 3,340 | 1.02 |
| | ACC* | 3,398 | 2.25 | 991 | 0.71 | Asp | GAU | 312 | 0.09 | 4,217 | 1.38 |
| | ACA | 133 | 0.09 | 2,075 | 1.5 | | GAC* | 6,729 | 1.91 | 1,891 | 0.62 |
| | ACG* | 2,378 | 1.57 | 495 | 0.36 | Gly | GGU | 363 | 0.13 | 2,301 | 1.35 |
| Val | GUU | 182 | 0.07 | 2,595 | 1.51 | | GGC* | 7,842 | 2.91 | 1,282 | 0.75 |
| | GUC* | 4,584 | 1.82 | 1,096 | 0.64 | | GGA | 397 | 0.15 | 2,044 | 1.19 |
| | GUA | 74 | 0.03 | 1,325 | 0.77 | | GGG* | 2,186 | 0.81 | 1,215 | 0.71 |
| | GUG* | 5,257 | 2.08 | 1,842 | 1.07 | Glu | GAA | 193 | 0.06 | 4,080 | 1.1 |
| | | | | | | | GAG* | 6,010 | 1.94 | 3,307 | 0.9 |

Codon usage was compared using Chi squared contingency test to identify optimal codons. Codons that occur significantly more often (P\0.01) are indicated with an asterisk.

TABLE 4

| | | | | | | | |
|---|---|---|---|---|---|---|---|
| TTT | F | 21.2 | (10493) | TCT | S | 18.4 | (9107) |
| TTC | F | 21.2 | (10487) | TCC | S | 12.9 | (6409) |
| TTA | L | 9.2 | (4545) | TCA | S | 15.6 | (7712) |
| TTG | L | 22.9 | (11340) | TCG | S | 4.8 | (2397) |
| CTT | L | 23.9 | (11829) | CCT | P | 18.9 | (9358) |
| CTC | L | 17.1 | (8479) | CCC | P | 10.1 | (5010) |
| CTA | L | 8.5 | (4216) | CCA | P | 19.1 | (9461) |
| CTG | L | 12.7 | (6304) | CCG | P | 4.7 | (2312) |
| ATT | I | 25.1 | (12411) | ACT | T | 17.1 | (8490) |
| ATC | I | 16.3 | (8071) | ACC | T | 14.3 | (7100) |
| ATA | I | 12.9 | (6386) | ACA | T | 14.9 | (7391) |
| ATG | M | 22.7 | (11218) | ACG | T | 4.3 | (2147) |
| GTT | V | 26.1 | (12911) | GCT | A | 26.7 | (13201) |
| GTC | V | 11.9 | (5894) | GCC | A | 16.2 | (8026) |
| GTA | V | 7.7 | (3803) | GCA | A | 21.4 | (10577) |
| GTG | V | 21.4 | (10610) | GCG | A | 6.3 | (3123) |
| TAT | Y | 15.7 | (7779) | TGT | C | 8.1 | (3995) |
| TAC | Y | 14.9 | (7367) | TGC | C | 8.0 | (3980) |
| TAA | * | 0.9 | (463) | TGA | * | 1.0 | (480) |
| TAG | * | 0.5 | (263) | TGG | W | 13.0 | (6412) |
| CAT | H | 14.0 | (6930) | CGT | R | 6.6 | (3291) |
| CAC | H | 11.6 | (5759) | CGC | R | 6.2 | (3093) |
| CAA | Q | 20.5 | (10162) | CGA | R | 4.1 | (2018) |
| CAG | Q | 16.2 | (8038) | CGG | R | 3.1 | (1510) |
| AAT | N | 22.4 | (11088) | AGT | S | 12.6 | (6237) |
| AAC | N | 22.8 | (11284) | AGC | S | 11.3 | (5594) |
| AAA | K | 26.9 | (13334) | AGA | R | 14.8 | (7337) |
| AAG | K | 35.9 | (17797) | AGG | R | 13.3 | (6574) |
| GAT | D | 32.4 | (16040) | GGT | G | 20.9 | (10353) |
| GAC | D | 20.4 | (10097) | GGC | G | 13.4 | (6650) |
| GAA | E | 33.2 | (16438) | GGA | G | 22.3 | (11022) |
| GAG | E | 33.2 | (16426) | GGG | G | 13.0 | (6431) |

[0237] A Glycine max codon usage table is shown in Table 4 and can also be found at kazusa.or.jp/codon/cgi-bin/showcodon.cgi?species=3847&aa=1&style=N, which can be accessed using the www prefix.

[0238] In some embodiments the recombinant nucleic acid molecule encoding a PtIP-83 polypeptide has maize optimized codons.

[0239] Additional sequence modifications are known to enhance gene expression in a cellular host. These include elimination of sequences encoding spurious polyadenylation signals, exon-intron splice site signals, transposon-like repeats, and other well-characterized sequences that may be deleterious to gene expression. The GC content of the sequence may be adjusted to levels average for a given cellular host, as calculated by reference to known genes expressed in the host cell. The term “host cell” as used herein refers to a cell which contains a vector and supports the replication and/or expression of the expression vector is intended. Host cells may be prokaryotic cells such as E. coli or eukaryotic cells such as yeast, insect, amphibian or mammalian cells or monocotyledonous or dicotyledonous plant cells. An example of a monocotyledonous host cell is a maize host cell. When possible, the sequence is modified to avoid PtIP-hairpin secondary mRNA structures.

[0240] The expression cassettes may additionally contain 5′ leader sequences. Such leader sequences can act to enhance translation. Translation leaders are known in the art and include: picornavirus leaders, for example, EMCV leader (Encephalomyocarditis 5′ noncoding region) (Elroy-Stein, et al., (1989) Proc. Natl. Acad. Sci. USA 86:6126-6130); potyvirus leaders, for example, TEV leader (Tobacco Etch Virus) (Gallie, et al., (1995) Gene 165(2):233-238), MDMV leader (Maize Dwarf Mosaic Virus), human immunoglobulin heavy-chain binding protein (BiP) (Macejak, et al., (1991) Nature 353:90-94); untranslated leader from the coat protein mRNA of alfalfa mosaic virus (AMV RNA 4) (Jobling, et al., (1987) Nature 325:622-625); tobacco mosaic virus leader (TMV) (Gallie, et al., (1989) in Molecular Biology of RNA, ed. Cech (Liss, New York), pp. 237-256) and maize chlorotic mottle virus leader (MCMV) (Lommel, et al., (1991) Virology 81:382-385). See also, Della-Cioppa, et al., (1987) Plant Physiol. 84:965-968. Such constructs may also contain a “signal sequence” or “leader sequence” to facilitate co-translational or post-translational transport of the peptide to certain intracellular structures such as the chloroplast (or other plastid), endoplasmic reticulum or Golgi apparatus.

[0241] “Signal sequence” as used herein refers to a sequence that is known or suspected to result in cotranslational or post-translational peptide transport across the cell membrane. In eukaryotes, this typically involves secretion into the Golgi apparatus, with some resulting glycosylation. Insecticidal toxins of bacteria are often synthesized as protoxins, which are protolytically activated in the gut of the target pest (Chang, (1987) Methods Enzymol. 153:507-516). In some embodiments, the signal sequence is located in the native sequence or may be derived from a sequence of the embodiments. “Leader sequence” as used herein refers to any sequence that when translated, results in an amino acid sequence sufficient to trigger co-translational transport of the peptide chain to a subcellular organelle. Thus, this includes leader sequences targeting transport and/or glycosylation by passage into the endoplasmic reticulum, passage to vacuoles, plastids including chloroplasts, mitochondria, and the like. Nuclear-encoded proteins targeted to the chloroplast thylakoid lumen compartment have a characteristic bipartite transit peptide, composed of a stromal targeting signal peptide and a lumen targeting signal peptide. The stromal targeting information is in the amino-proximal portion of the transit peptide. The lumen targeting signal peptide is in the carboxyl-proximal portion of the transit peptide, and contains all the information for targeting to the lumen. Recent research in proteomics of the higher plant chloroplast has achieved in the identification of numerous nuclear-encoded lumen proteins (Kieselbach et al. FEBS LETT 480:271-276, 2000; Peltier et al. Plant Cell 12:319-341, 2000; Bricker et al. Biochim. Biophys Acta 1503:350-356, 2001), the lumen targeting signal peptide of which can potentially be used in accordance with the present disclosure. About 80 proteins from Arabidopsis, as well as homologous proteins from spinach and garden pea, are reported by Kieselbach et al., Photosynthesis Research, 78:249-264, 2003. In particular, Table 2 of this publication, which is incorporated into the description herewith by reference, discloses 85 proteins from the chloroplast lumen, identified by their accession number (see also US Patent Application Publication 2009/09044298). In addition, the recently published draft version of the rice genome (Goff et al, Science 296:92-100, 2002) is a suitable source for lumen targeting signal peptide which may be used in accordance with the present disclosure.

[0242] Suitable chloroplast transit peptides (CTP) are well known to one skilled in the art also include chimeric CTPs comprising but not limited to, an N-terminal domain, a central domain or a C-terminal domain from a CTP from Oryza sativa 1-deoxy-D xyulose-5-Phosphate Synthase Oryza sativa-Superoxide dismutase Oryza sativa-soluble starch synthase Oryza sativa-NADP-dependent Malic acid enzyme Oryza sativa-Phospho-2-dehydro-3-deoxyheptonate Aldolase 2 Oryza sativa-L-Ascorbate peroxidase 5 Oryza sativa-Phosphoglucan water dikinase, Zea mays ssRUBISCO, Zea mays-beta-glucosidase, Zea Mays-Malate dehydrogenase, Zea mays Thioredoxin M-type US Patent Application Publication 2012/0304336).

[0243] The PtIP-83 polypeptide gene to be targeted to the chloroplast may be optimized for expression in the chloroplast to account for differences in codon usage between the plant nucleus and this organelle. In this manner, the nucleic acids of interest may be synthesized using chloroplast-preferred codons. See, for example, U.S. Pat. No. 5,380,831, herein incorporated by reference.

[0244] In preparing the expression cassette, the various DNA fragments may be manipulated so as to provide for the DNA sequences in the proper orientation and, as appropriate, in the proper reading frame. Toward this end, adapters or linkers may be employed to join the DNA fragments or other manipulations may be involved to provide for convenient restriction sites, removal of superfluous DNA, removal of restriction sites or the like. For this purpose, in vitro mutagenesis, primer repair, restriction, annealing, resubstitutions, e.g., transitions and transversions, may be involved.

[0245] A number of promoters can be used in the practice of the embodiments. The promoters can be selected based on the desired outcome. The nucleic acids can be combined with constitutive, tissue-preferred, inducible or other promoters for expression in the host organism. Suitable constitutive promoters for use in a plant host cell include, for example, the core promoter of the Rsyn7 promoter and other constitutive promoters disclosed in WO 1999/43838 and U.S. Pat. No. 6,072,050; the core CaMV 35S promoter (Odell, et al., (1985) Nature 313:810-812); rice actin (McElroy, et al., (1990) Plant Cell 2:163-171); ubiquitin (Christensen, et al., (1989) Plant Mol. Biol. 12:619-632 and Christensen, et al., (1992) Plant Mol. Biol. 18:675-689); ubiquitin 10 promoter (Grefen, C. et al. (2010) The Plant Journal 64, 355-365); pEMU (Last, et al., (1991) Theor. Appl. Genet. 81:581-588); MAS (Velten, et al., (1984) EMBO J. 3:2723-2730); ALS promoter (U.S. Pat. No. 5,659,026) and the like. Other constitutive promoters include, for example, those discussed in U.S. Pat. Nos. 5,608,149; 5,608,144; 5,604,121; 5,569,597; 5,466,785; 5,399,680; 5,268,463; 5,608,142 and 6,177,611.

[0246] Depending on the desired outcome, it may be beneficial to express the gene from an inducible promoter. Of particular interest for regulating the expression of the nucleotide sequences of the embodiments in plants are wound-inducible promoters. Such wound-inducible promoters, may respond to damage caused by insect feeding, and include potato proteinase inhibitor (pin II) gene (Ryan, (1990) Ann. Rev. Phytopath. 28:425-449; Duan, et al., (1996) Nature Biotechnology 14:494-498); wun1 and wun2, U.S. Pat. No. 5,428,148; win1 and win2 (Stanford, et al., (1989) Mol. Gen. Genet. 215:200-208); systemin (McGurl, et al., (1992) Science 225:1570-1573); WIP1 (Rohmeier, et al., (1993) Plant Mol. Biol. 22:783-792; Eckelkamp, et al., (1993) FEBS Letters 323:73-76); MPI gene (Corderok, et al., (1994) Plant J. 6(2):141-150) and the like, herein incorporated by reference.

[0247] Additionally, pathogen-inducible promoters may be employed in the methods and nucleotide constructs of the embodiments. Such pathogen-inducible promoters include those from pathogenesis-related proteins (PR proteins), which are induced following infection by a pathogen; e.g., PR proteins, SAR proteins, beta-1,3-glucanase, chitinase, etc. See, for example, Redolfi, et al., (1983) Neth. J. Plant Pathol. 89:245-254; Uknes, et al., (1992) Plant Cell 4: 645-656 and Van Loon, (1985) Plant Mol. Virol. 4:111-116. See also, WO 1999/43819, herein incorporated by reference.

Of interest are promoters that are expressed locally at or near the site of pathogen infection. See, for example, Marineau, et al., (1987) Plant Mol. Biol. 9:335-342; Matton, et al., (1989) Molecular Plant-Microbe Interactions 2:325-331; Somsisch, et al., (1986) Proc. Natl. Acad. Sci. USA 83:2427-2430; Somsisch, et al., (1988) Mol. Gen. Genet. 2:93-98 and Yang, (1996) Proc. Natl. Acad. Sci. USA 93:14972-14977. See also, Chen, et al., (1996) Plant J. 10:955-966; Zhang, et al., (1994) Proc. Natl. Acad. Sci. USA 91:2507-2511; Warner, et al., (1993) Plant J. 3:191-201; Siebertz, et al., (1989) Plant Cell 1:961-968; U.S. Pat. No. 5,750,386 (nematode-inducible) and the references cited therein. Of particular interest is the inducible promoter for the maize PRms gene, whose expression is induced by the pathogen Fusarium moniliforme (see, for example, Cordero, et al., (1992) Physiol. Mol. Plant Path. 41:189-200).

[0248] Chemical-regulated promoters can be used to modulate the expression of a gene in a plant through the application of an exogenous chemical regulator. Depending upon the objective, the promoter may be a chemical-inducible promoter, where application of the chemical induces gene expression or a chemical-repressible promoter, where application of the chemical represses gene expression. Chemical-inducible promoters are known in the art and include, but are not limited to, the maize In2-2 promoter, which is activated by benzenesulfonamide herbicide safeners, the maize GST promoter, which is activated by hydrophobic electrophilic compounds that are used as pre-emergent herbicides, and the tobacco PR-1a promoter, which is activated by salicylic acid. Other chemical-regulated promoters of interest include steroid-responsive promoters (see, for example, the glucocorticoid-inducible promoter in Schena, et al., (1991) Proc. Natl. Acad. Sci. USA 88:10421-10425 and McNellis, et al., (1998) Plant J. 14(2):247-257) and tetracycline-inducible and tetracycline-repressible promoters (see, for example, Gatz, et al., (1991) Mol. Gen. Genet. 227:229-237 and U.S. Pat. Nos. 5,814,618 and 5,789,156), herein incorporated by reference.

[0249] Tissue-preferred promoters can be utilized to target enhanced PtIP-83 polypeptide expression within a particular plant tissue. Tissue-preferred promoters include those discussed in Yamamoto, et al., (1997) Plant J. 12(2)255-265; Kawamata, et al., (1997) Plant Cell Physiol. 38(7):792-803; Hansen, et al., (1997) Mol. Gen Genet. 254(3):337-343; Russell, et al., (1997) Transgenic Res. 6(2):157-168; Rinehart, et al., (1996) Plant Physiol. 112(3):1331-1341; Van Camp, et al., (1996) Plant Physiol. 112(2):525-535; Canevascini, et al., (1996) Plant Physiol. 112(2):513-524; Yamamoto, et al., (1994) Plant Cell Physiol. 35(5):773-778; Lam, (1994) Results Probl. Cell Differ. 20:181-196; Orozco, et al., (1993) Plant Mol Biol. 23(6):1129-1138; Matsuoka, et al., (1993) Proc Natl. Acad. Sci. USA 90(20):9586-9590 and Guevara-Garcia, et al., (1993) Plant J. 4(3):495-505. Such promoters can be modified, if necessary, for weak expression.

Leaf-preferred promoters are known in the art. See, for example, Yamamoto, et al., (1997) Plant J. 12(2):255-265; Kwon, et al., (1994) Plant Physiol. 105:357-67; Yamamoto, et al., (1994) Plant Cell Physiol. 35(5):773-778; Gotor, et al., (1993) Plant J. 3:509-18; Orozco, et al., (1993) Plant Mol. Biol. 23(6):1129-1138 and Matsuoka, et al., (1993) Proc. Natl. Acad. Sci. USA 90(20):9586-9590.

[0250] Root-preferred or root-specific promoters are known and can be selected from the many available from the literature or isolated de novo from various compatible species. See, for example, Hire, et al., (1992) Plant Mol. Biol. 20(2):207-218 (soybean root-specific glutamine synthetase gene); Keller and Baumgartner, (1991) Plant Cell 3(10):1051-1061 (root-specific control element in the GRP 1.8 gene of French bean); Sanger, et al., (1990) Plant Mol. Biol. 14(3):433-443 (root-specific promoter of the mannopine synthase (MAS) gene of Agrobacterium tumefaciens) and Miao, et al., (1991) Plant Cell 3(1):11-22 (full-length cDNA clone encoding cytosolic glutamine synthetase (GS), which is expressed in roots and root nodules of soybean). See also, Bogusz, et al., (1990) Plant Cell 2(7):633-641, where two root-specific promoters isolated from hemoglobin genes from the nitrogen-fixing nonlegume Parasponia andersonii and the related non-nitrogen-fixing nonlegume Trema tomentosa are described. The promoters of these genes were linked to a p-glucuronidase reporter gene and introduced into both the nonlegume Nicotiana tabacum and the legume Lotus corniculatus, and in both instances root-specific promoter activity was preserved. Leach and Aoyagi, (1991) describe their analysis of the promoters of the highly expressed rolC and rolD root-inducing genes of Agrobacterium rhizogenes (see, Plant Science (Limerick) 79(1):69-76). They concluded that enhancer and tissue-preferred DNA determinants are dissociated in those promoters. Teer, et al., (1989) used gene fusion to lacZ to show that the Agrobacterium T-DNA gene encoding octopine synthase is especially active in the epidermis of the root tip and that the TR2′ gene is root specific in the intact plant and stimulated by wounding in leaf tissue, an especially desirable combination of characteristics for use with an insecticidal or larvicidal gene (see, EMBO J. 8(2):343-350). The TR1 gene fused to nptII (neomycin phosphotransferase II) showed similar characteristics. Additional root-preferred promoters include the VfENOD-GRP3 gene promoter (Kuster, et al., (1995) Plant Mol. Biol. 29(4):759-772) and rolB promoter (Capana, et al., (1994) Plant Mol. Biol. 25(4):681-691. See also, U.S. Pat. Nos. 5,837,876; 5,750,386; 5,633,363; 5,459,252; 5,401,836; 5,110,732 and 5,023,179. Arabidopsis thaliana root-preferred regulatory sequences are disclosed in US20130117883.

[0251] “Seed-preferred” promoters include both “seed-specific” promoters (those promoters active during seed development such as promoters of seed storage proteins) as well as “seed-germinating” promoters (those promoters active during seed germination). See, Thompson, et al., (1989) BioEssays 10:108, herein incorporated by reference. Such seed-preferred promoters include, but are not limited to, Cim1 (cytokinin-induced message); cZ19B1 (maize 19 kDa zein); and milps (myo-inositol-1-phosphate synthase) (see, U.S. Pat. No. 6,225,529, herein incorporated by reference). Gamma-zein and Glb-1 are endosperm-specific promoters. For dicots, seed-specific promoters include, but are not limited to, Kunitz trypsin inhibitor 3 (KTi3) (Jofuku and Goldberg, (1989) Plant Cell 1:1079-1093), bean β-phaseolin, napin, β-conglycinin, glycinin 1, soybean lectin, cruciferin, and the like. For monocots, seed-specific promoters include, but are not limited to, maize 15 kDa zein, 22 kDa zein, 27 kDa zein, g-zein, waxy, shrunken 1, shrunken 2, globulin 1, etc. See also, WO 2000/12733, where seed-preferred promoters from end1 and end2 genes are disclosed; herein incorporated by reference. In dicots, seed specific promoters include but are not limited to seed coat promoter from Arabidopsis, pBAN; and the early seed promoters from Arabidopsis, p26, p63, and p63tr (U.S. Pat. Nos. 7,294,760 and 7,847,153). A promoter that has “preferred” expression in a particular tissue is expressed in that tissue to a greater degree than in at least one other plant tissue. Some tissue-preferred promoters show expression almost exclusively in the particular tissue.

[0252] Where low level expression is desired, weak promoters will be used. Generally, the term “weak promoter” as used herein refers to a promoter that drives expression of a coding sequence at a low level. By low level expression at levels of between about 1/1000 transcripts to about 1/100,000 transcripts to about 1/500,000 transcripts is intended. Alternatively, it is recognized that the term “weak promoters” also encompasses promoters that drive expression in only a few cells and not in others to give a total low level of expression. Where a promoter drives expression at unacceptably high levels, portions of the promoter sequence can be deleted or modified to decrease expression levels.

Such weak constitutive promoters include, for example the core promoter of the Rsyn7 promoter (WO 1999/43838 and U.S. Pat. No. 6,072,050), the core 35S CaMV promoter, and the like. Other constitutive promoters include, for example, those disclosed in U.S. Pat. Nos. 5,608,149; 5,608,144; 5,604,121; 5,569,597; 5,466,785; 5,399,680; 5,268,463; 5,608,142 and 6,177,611, herein incorporated by reference.
The above list of promoters is not meant to be limiting. Any appropriate promoter can be used in the embodiments.

[0253] Generally, the expression cassette will comprise a selectable marker gene for the selection of transformed cells. Selectable marker genes are utilized for the selection of transformed cells or tissues. Marker genes include genes encoding antibiotic resistance, such as those encoding neomycin phosphotransferase II (NEO) and hygromycin phosphotransferase (HPT), as well as genes conferring resistance to herbicidal compounds, such as glufosinate ammonium, bromoxynil, imidazolinones and 2,4-dichlorophenoxyacetate (2,4-D). Additional examples of suitable selectable marker genes include, but are not limited to, genes encoding resistance to chloramphenicol (Herrera Estrella, et al., (1983) EMBO J. 2:987-992); methotrexate (Herrera Estrella, et al., (1983) Nature 303:209-213 and Meijer, et al., (1991) Plant Mol. Biol. 16:807-820); streptomycin (Jones, et al., (1987) Mol. Gen. Genet. 210:86-91); spectinomycin (Bretagne-Sagnard, et al., (1996) Transgenic Res. 5:131-137); bleomycin (Hille, et al., (1990) Plant Mol. Biol. 7:171-176); sulfonamide (Guerineau, et al., (1990) Plant Mol. Biol. 15:127-136); bromoxynil (Stalker, et al., (1988) Science 242:419-423); glyphosate (Shaw, et al., (1986) Science 233:478-481 and U.S. patent application Ser. Nos. 10/004,357 and 10/427,692); phosphinothricin (DeBlock, et al., (1987) EMBO J. 6:2513-2518). See generally, Yarranton, (1992) Curr. Opin. Biotech. 3:506-511; Christopherson, et al., (1992) Proc. Natl. Acad. Sci. USA 89:6314-6318; Yao, et al., (1992) Cell 71:63-72; Reznikoff, (1992) Mol. Microbiol. 6:2419-2422; Barkley, et al., (1980) in The Operon, pp. 177-220; Hu, et al., (1987) Cell 48:555-566; Brown, et al., (1987) Cell 49:603-612; Figge, et al., (1988) Cell 52:713-722; Deuschle, et al., (1989) Proc. Natl. Acad. Sci. USA 86:5400-5404; Fuerst, et al., (1989) Proc. Natl. Acad. Sci. USA 86:2549-2553; Deuschle, et al., (1990) Science 248:480-483; Gossen, (1993) Ph.D. Thesis, University of Heidelberg; Reines, et al., (1993) Proc. Natl. Acad. Sci. USA 90:1917-1921; Labow, et al., (1990) Mol. Cell. Biol. 10:3343-3356; Zambretti, et al., (1992) Proc. Natl. Acad. Sci. USA 89:3952-3956; Baim, et al., (1991) Proc. Natl. Acad. Sci. USA 88:5072-5076; Wyborski, et al., (1991) Nucleic Acids Res. 19:4647-4653; Hillenand-Wissman, (1989) Topics Mol. Struc. Biol. 10:143-162; Degenkolb, et al., (1991) Antimicrob. Agents Chemother. 35:1591-1595; Kleinschnidt, et al., (1988) Biochemistry 27:1094-1104; Bonin, (1993) Ph.D. Thesis, University of Heidelberg; Gossen, et al., (1992) Proc. Natl. Acad. Sci. USA 89:5547-5551; Oliva, et al., (1992) Antimicrob. Agents Chemother. 36:913-919; Hlavka, et al., (1985) Handbook of Experimental Pharmacology, Vol. 78 (Springer-Verlag, Berlin) and Gill, et al., (1988) Nature 334:721-724. Such disclosures are herein incorporated by reference.

The above list of selectable marker genes is not meant to be limiting. Any selectable marker gene can be used in the embodiments.

### Plant Transformation

[0254] The methods of the embodiments involve introducing a polypeptide or polynucleotide into a plant. “Introducing” is as used herein means presenting to the plant the polynucleotide or polypeptide in such a manner that the sequence gains access to the interior of a cell of the plant. The methods of the embodiments do not depend on a particular method for introducing a polynucleotide or polypeptide into a plant, only that the polynucleotide or polypeptides gains access to the interior of at least one cell of the plant. Methods for introducing polynucleotide or polypeptides into plants are known in the art including, but not limited to, stable transformation methods, transient transformation methods, and virus-mediated methods.

[0255] “Stable transformation” is as used herein means that the nucleotide construct introduced into a plant integrates into the genome of the plant and is capable of being inherited by the progeny thereof. “Transient transformation” as used herein means that a polynucleotide is introduced into the plant and does not integrate into the genome of the plant or a polypeptide is introduced into a plant. “Plant” as used herein refers to whole plants, plant organs (e.g., leaves, stems, roots, etc.), seeds, plant cells, propagules, embryos and progeny of the same. Plant cells can be differentiated or undifferentiated (e.g. callus, suspension culture cells, protoplasts, leaf cells, root cells, phloem cells and pollen).

[0256] Transformation protocols as well as protocols for introducing nucleotide sequences into plants may vary depending on the type of plant or plant cell, i.e., monocot or dicot, targeted for transformation. Suitable methods of introducing nucleotide sequences into plant cells and subsequent insertion into the plant genome include microinjection (Crossway, et al., (1986) Biotechniques 4:320-334), electroporation (Riggs, et al., (1986) Proc. Natl. Acad. Sci. USA 83:5602-5606), Agrobacterium-mediated transformation (U.S. Pat. Nos. 5,563,055 and 5,981,840), direct gene transfer (Paszkowski, et al., (1984) EMBO J. 3:2717-2722) and ballistic particle acceleration (see, for example, U.S. Pat. Nos. 4,945,050; 5,879,918; 5,886,244 and 5,932,782; Tomes, et al., (1995) in Plant Cell, Tissue, and Organ Culture: Fundamental Methods, ed. Gamborg and Phillips, (Springer-Verlag, Berlin) and McCabe, et al., (1988) Biotechnology 6:923-926) and Led transformation (WO 00/28058). For potato transformation see, Tu, et al., (1998) Plant Molecular Biology 37:829-838 and Chong, et al., (2000) Transgenic Research 9:71-78. Additional transformation procedures can be found in Weissinger, et al., (1988) Ann. Rev. Genet. 22:421-477; Sanford, et al., (1987) Particulate Science and Technology 5:27-37 (onion); Christou, et al., (1988) Plant Physiol. 87:671-674 (soybean); McCabe, et al., (1988) Bio/Technology 6:923-926 (soybean); Finer and McMullen, (1991) In Vitro Cell Dev. Biol. 27P:175-182 (soybean); Singh, et al., (1998) Theor. Appl. Genet. 96:319-324 (soybean); Datta, et al., (1990) Biotechnology 8:736-740 (rice); Klein, et al., (1988) Proc. Natl. Acad. Sci. USA 85:4305-4309 (maize); Klein, et al., (1988) Biotechnology 6:559-563 (maize); U.S. Pat. Nos. 5,240,855; 5,322,783 and 5,324,646; Klein, et al., (1988) Plant Physiol. 91:440-444 (maize); Fromm, et al., (1990) Biotechnology 8:833-839 (maize); Hooykaas-Van Slogteren, et al., (1984) Nature (London) 311:763-764; U.S. Pat. No. 5,736,369 (cereals); Bytebier, et al., (1987) Proc. Natl. Acad. Sci. USA 84:5345-5349 (Liliaceae); De Wet, et al., (1985) in The Experimental Manipulation of Ovule Tissues, ed. Chapman, et al., (Longman, New York), pp. 197-209 (pollen); Kaeppler, et al., (1990) Plant Cell Reports 9:415-418 and Kaeppler, et al., (1992) Theor. Appl. Genet. 84:560-566 (whisker-mediated transformation); D'Halluin, et al., (1992) Plant Cell 4:1495-1505 (electroporation); Li, et al., (1993) Plant Cell Reports 12:250-255 and Christou and Ford, (1995) Annals of Botany 75:407-413 (rice); Osjoda, et al., (1996) Nature Biotechnology 14:745-750 (maize via Agrobacterium tumefaciens); all of which are herein incorporated by reference.

[0257] In specific embodiments, the sequences of the embodiments can be provided to a plant using a variety of transient transformation methods. Such transient transformation methods include, but are not limited to, the introduction of the PtIP-83 polynucleotide or variants and fragments thereof directly into the plant or the introduction of the PtIP-83 polypeptide transcript into the plant. Such methods include, for example, microinjection or particle bombardment. See, for example, Crossway, et al., (1986) Mol Gen. Genet. 202:179-185; Nomura, et al., (1986) Plant Sci. 44:53-58; Hepler, et al., (1994) Proc. Natl. Acad. Sci. 91:2176-2180 and Hush, et al., (1994) The Journal of Cell Science 107:775-784, all of which are herein incorporated by reference. Alternatively, the PtIP-83 polypeptide polynucleotide can be transiently transformed into the plant using techniques known in the art. Such techniques include viral vector system and the precipitation of the polynucleotide in a manner that precludes subsequent release of the DNA. Thus, transcription from the particle-bound DNA can occur, but the frequency with which it is released to become integrated into the genome is greatly reduced. Such methods include the use of particles coated with polyethylimine (PEI; Sigma #P3143).

[0258] Methods are known in the art for the targeted insertion of a polynucleotide at a specific location in the plant genome. In one embodiment, the insertion of the polynucleotide at a desired genomic location is achieved using a site-specific recombination system. See, for example, WO 1999/25821, WO 1999/25854, WO 1999/25840, WO 1999/25855 and WO 1999/25853, all of which are herein incorporated by reference. Briefly, the polynucleotide of the embodiments can be contained in transfer cassette flanked by two non-identical recombination sites. The transfer cassette is introduced into a plant have stably incorporated into its genome a target site which is flanked by two non-identical recombination sites that correspond to the sites of the transfer cassette. An appropriate recombinase is provided and the transfer cassette is integrated at the target site. The polynucleotide of interest is thereby integrated at a specific chromosomal position in the plant genome.

[0259] Plant transformation vectors may be comprised of one or more DNA vectors needed for achieving plant transformation. For example, it is a common practice in the art to utilize plant transformation vectors that are comprised of more than one contiguous DNA segment. These vectors are often referred to in the art as “binary vectors”. Binary vectors as well as vectors with helper plasmids are most often used for Agrobacterium-mediated transformation, where the size and complexity of DNA segments needed to achieve efficient transformation is quite large, and it is advantageous to separate functions onto separate DNA molecules. Binary vectors typically contain a plasmid vector that contains the cis-acting sequences required for T-DNA transfer (such as left border and right border), a selectable marker that is engineered to be capable of expression in a plant cell, and a “gene of interest” (a gene engineered to be capable of expression in a plant cell for which generation of transgenic plants is desired). Also present on this plasmid vector are sequences required for bacterial replication. The cis-acting sequences are arranged in a fashion to allow efficient transfer into plant cells and expression therein. For example, the selectable marker gene and the pesticidal gene are located between the left and right borders. Often a second plasmid vector contains the trans-acting factors that mediate T-DNA transfer from Agrobacterium to plant cells. This plasmid often contains the virulence functions (Vir genes) that allow infection of plant cells by Agrobacterium, and transfer of DNA by cleavage at border sequences and vir-mediated DNA transfer, as is understood in the art (Hellens and Mullineaux, (2000) Trends in Plant Science 5:446-451). Several types of Agrobacterium strains (e.g. LBA4404, GV3101, EHA101, EHA105, etc.) can be used for plant transformation. The second plasmid vector is not necessary for transforming the plants by other methods such as microprojection, microinjection, electroporation, polyethylene glycol, etc.

[0260] In general, plant transformation methods involve transferring heterologous DNA into target plant cells (e.g., immature or mature embryos, suspension cultures, undifferentiated callus, protoplasts, etc.), followed by applying a maximum threshold level of appropriate selection (depending on the selectable marker gene) to recover the transformed plant cells from a group of untransformed cell mass. Following integration of heterologous foreign DNA into plant cells, one then applies a maximum threshold level of appropriate selection in the medium to kill the untransformed cells and separate and proliferate the putatively transformed cells that survive from this selection treatment by transferring regularly to a fresh medium. By continuous passage and challenge with appropriate selection, one identifies and proliferates the cells that are transformed with the plasmid vector. Molecular and biochemical methods can then be used to confirm the presence of the integrated heterologous gene of interest into the genome of the transgenic plant.

[0261] Explants are typically transferred to a fresh supply of the same medium and cultured routinely. Subsequently, the transformed cells are differentiated into shoots after placing on regeneration medium supplemented with a maximum threshold level of selecting agent. The shoots are then transferred to a selective rooting medium for recovering rooted shoot or plantlet. The transgenic plantlet then grows into a mature plant and produces fertile seeds (e.g., Hiei, et al., (1994) The Plant Journal 6:271-282; Ishida, et al., (1996) Nature Biotechnology 14:745-750). Explants are typically transferred to a fresh supply of the same medium and cultured routinely. A general description of the techniques and methods for generating transgenic plants are found in Ayres and Park, (1994) Critical Reviews in Plant Science 13:219-239 and Bommineni and Jauhar, (1997) Maydica 42:107-120. Since the transformed material contains many cells; both transformed and non-transformed cells are present in any piece of subjected target callus or tissue or group of cells. The ability to kill non-transformed cells and allow transformed cells to proliferate results in transformed plant cultures. Often, the ability to remove non-transformed cells is a limitation to rapid recovery of transformed plant cells and successful generation of transgenic plants.

[0262] The cells that have been transformed may be grown into plants in accordance with conventional ways. See, for example, McCormick, et al., (1986) Plant Cell Reports 5:81-84. These plants may then be grown, and either pollinated with the same transformed strain or different strains, and the resulting hybrid having constitutive or inducible expression of the desired phenotypic characteristic identified. Two or more generations may be grown to ensure that expression of the desired phenotypic characteristic is stably maintained and inherited and then seeds harvested to ensure that expression of the desired phenotypic characteristic has been achieved.

[0263] The nucleotide sequences of the embodiments may be provided to the plant by contacting the plant with a virus or viral nucleic acids. Generally, such methods involve incorporating the nucleotide construct of interest within a viral DNA or RNA molecule. It is recognized that the recombinant proteins of the embodiments may be initially synthesized as part of a viral polyprotein, which later may be processed by proteolysis in vivo or in vitro to produce the desired PtIP-83 polypeptide. It is also recognized that such a viral polyprotein, comprising at least a portion of the amino acid sequence of a PtIP-83 of the embodiments, may have the desired pesticidal activity. Such viral polyproteins and the nucleotide sequences that encode for them are encompassed by the embodiments. Methods for providing plants with nucleotide constructs and producing the encoded proteins in the plants, which involve viral DNA or RNA molecules are known in the art. See, for example, U.S. Pat. Nos. 5,889,191; 5,889,190; 5,866,785; 5,589,367 and 5,316,931; herein incorporated by reference.

[0264] Methods for transformation of chloroplasts are known in the art. See, for example, Svab, et al., (1990) Proc. Natl. Acad. Sci. USA 87:8526-8530; Svab and Maliga, (1993) Proc. Natl. Acad. Sci. USA 90:913-917; Svab and Maliga, (1993) EMBO J. 12:601-606. The method relies on particle gun delivery of DNA containing a selectable marker and targeting of the DNA to the plastid genome through homologous recombination. Additionally, plastid transformation can be accomplished by transactivation of a silent plastid-borne transgene by tissue-preferred expression of a nuclear-encoded and plastid-directed RNA polymerase. Such a system has been reported in McBride, et al., (1994) Proc. Natl. Acad. Sci. USA 91:7301-7305.

[0265] The embodiments further relate to plant-propagating material of a transformed plant of the embodiments including, but not limited to, seeds, tubers, corms, bulbs, leaves and cuttings of roots and shoots.

[0266] The embodiments may be used for transformation of any plant species, including, but not limited to, monocots and dicots. Examples of plants of interest include, but are not limited to, corn (Zea mays), Brassica sp. (e.g., B. napus, B. rapa, B. juncea), particularly those Brassica species useful as sources of seed oil, alfalfa (Medicago sativa), rice (Oryza sativa), rye (Secale cereale), sorghum (Sorghum bicolor, Sorghum vulgare), millet (e.g., pearl millet (Pennisetum glaucum), proso millet (Panicum miliaceum), foxtail millet (Setaria italica), finger millet (Eleusine coracana)), sunflower (Helianthus annuus), safflower (Carthamus tinctorius), wheat (Triticum aestivum), soybean (Glycine max), tobacco (Nicotiana tabacum), potato (Solanum tuberosum), peanuts (Arachis hypogaea), cotton (Gossypium barbadense, Gossypium hirsutum), sweet potato (Ipomoea batatus), cassava (Manihot esculenta), coffee (Coffea spp.), coconut (Cocos nucifera), pineapple (Ananas comosus), citrus trees (Citrus spp.), cocoa (Theobroma cacao), tea (Camellia sinensis), banana (Musa spp.), avocado (Persea americana), fig (Ficus casica), guava (Psidium guajava), mango (Mangifera indica), olive (Olea europaea), papaya (Carica papaya), cashew (Anacardium occidentale), macadamia (Macadamia integrifolia), almond (Prunus amygdalus), sugar beets (Beta vulgaris), sugarcane (Saccharum spp.), oats, barley, vegetables ornamentals, and conifers.

[0267] Vegetables include tomatoes (Lycopersicon esculentum), lettuce (e.g., Lactuca sativa), green beans (Phaseolus vulgaris), lima beans (Phaseolus limensis), peas (Lathyrus spp.), and members of the genus Cucumis such as cucumber (C. sativus), cantaloupe (C. cantalupensis), and musk melon (C. melo). Ornamentals include azalea (Rhododendron spp.), hydrangea (Macrophylla hydrangea), hibiscus (Hibiscus rosasanensis), roses (Rosa spp.), tulips (Tulipa spp.), daffodils (Narcissus spp.), petunias (Petunia hybrida), carnation (Dianthus caryophyllus), poinsettia (Euphorbia pulcherrima), and chrysanthemum. Conifers that may be employed in practicing the embodiments include, for example, pines such as loblolly pine (Pinus taeda), slash pine (Pinus elliotii), ponderosa pine (Pinus ponderosa), lodgepole pine (Pinus contorta), and Monterey pine (Pinus radiata); Douglas-fir (Pseudotsuga menziesii); Western hemlock (Tsuga canadensis); Sitka spruce (Picea glauca); redwood (Sequoia sempervirens); true firs such as silver fir (Abies amabilis) and balsam fir (Abies balsamea); and cedars such as Western red cedar (Thuja plicata) and Alaska yellow-cedar (Chamaecyparis nootkatensis). Plants of the embodiments include crop plants (for example, corn, alfalfa, sunflower, Brassica, soybean, cotton, safflower, peanut, sorghum, wheat, millet, tobacco, etc.), such as corn and soybean plants.

[0268] Turf grasses include, but are not limited to: annual bluegrass (Poa annua); annual ryegrass (Lolium multiflorum); Canada bluegrass (Poa compressa); Chewing's fescue (Festuca rubra); colonial bentgrass (Agrostis tenuis); creeping bentgrass (Agrostis palustris); crested wheatgrass (Agropyron desertorum); fairway wheatgrass (Agropyron cristatum); hard fescue (Festuca longifolia); Kentucky bluegrass (Poa pratensis); orchardgrass (Dactylis glomerata); perennial ryegrass (Lolium perenne); red fescue (Festuca rubra); redtop (Agrostis alba); rough bluegrass (Poa trivialis); sheep fescue (Festuca ovina); smooth bromegrass (Bromus inermis); tall fescue (Festuca arundinacea); timothy (Phleum pratense); velvet bentgrass (Agrostis canina); weeping alkaligrass (Puccinellia distans); western wheatgrass (Agropyron smithii); Bermuda grass (Cynodon spp.); St. Augustine grass (Stenotaphrum secundatum); zoysia grass (Zoysia spp.); Bahia grass (Paspalum notatum); carpet grass (Axonopus affinis); centipede grass (Eremochloa ophiuroides); kikuyu grass (Pennisetum clandesinum); seashore paspalum (Paspalum vaginatum); blue gramma (Bouteloua gracilis); buffalo grass (Buchloe dactyloids); sideoats gramma (Bouteloua curtipendula).

[0269] Plants of interest include grain plants that provide seeds of interest, oil-seed plants, and leguminous plants. Seeds of interest include grain seeds, such as corn, wheat, barley, rice, sorghum, rye, millet, etc. Oil-seed plants include cotton, soybean, safflower, sunflower, Brassica, maize, alfalfa, palm, coconut, flax, castor, olive, etc. Leguminous plants include beans and peas. Beans include guar, locust bean, fenugreek, soybean, garden beans, cowpea, mungbean, lima bean, fava bean, lentils, chickpea, etc.

### Evaluation of Plant Transformation

[0270] Following introduction of heterologous foreign DNA into plant cells, the transformation or integration of heterologous gene in the plant genome is confirmed by various methods such as analysis of nucleic acids, proteins and metabolites associated with the integrated gene. PCR analysis is a rapid method to screen transformed cells, tissue or shoots for the presence of incorporated gene at the earlier stage before transplanting into the soil (Sambrook and Russell, (2001) Molecular Cloning: A Laboratory Manual. Cold Spring Harbor Laboratory Press, Cold Spring Harbor, NY). PCR is carried out using oligonucleotide primers specific to the gene of interest or Agrobacterium vector background, etc.

Plant transformation may be confirmed by Southern blot analysis of genomic DNA (Sambrook and Russell, (2001) supra). In general, total DNA is extracted from the transformant, digested with appropriate restriction enzymes, fractionated in an agarose gel and transferred to a nitrocellulose or nylon membrane. The membrane or “blot” is then probed with, for example, radiolabeled 32P target DNA fragment to confirm the integration of introduced gene into the plant genome according to standard techniques (Sambrook and Russell, (2001) supra).

[0271] In Northern blot analysis, RNA is isolated from specific tissues of transformant, fractionated in a formaldehyde agarose gel, and blotted onto a nylon filter according to standard procedures that are routinely used in the art (Sambrook and Russell, (2001) supra). Expression of RNA encoded by the pesticidal gene is then tested by hybridizing the filter to a radioactive probe derived from a pesticidal gene, by methods known in the art (Sambrook and Russell, (2001) supra).

[0272] Western blot, biochemical assays and the like may be carried out on the transgenic plants to confirm the presence of protein encoded by the pesticidal gene by standard procedures (Sambrook and Russell, 2001, supra) using antibodies that bind to one or more epitopes present on the PtIP-83 polypeptide.

### Stacking of Traits in Transgenic Plant

[0273] Transgenic plants may comprise a stack of one or more insecticidal polynucleotides disclosed herein with one or more additional polynucleotides resulting in the production or suppression of multiple polypeptide sequences. Transgenic plants comprising stacks of polynucleotide sequences can be obtained by either or both of traditional breeding methods or through genetic engineering methods. These methods include, but are not limited to, breeding individual lines each comprising a polynucleotide of interest, transforming a transgenic plant comprising a gene disclosed herein with a subsequent gene and co-transformation of genes into a single plant cell. As used herein, the term “stacked” includes having the multiple traits present in the same plant (i.e., both traits are incorporated into the nuclear genome, one trait is incorporated into the nuclear genome and one trait is incorporated into the genome of a plastid or both traits are incorporated into the genome of a plastid). In one non-limiting example, “stacked traits” comprise a molecular stack where the sequences are physically adjacent to each other. A trait, as used herein, refers to the phenotype derived from a particular sequence or groups of sequences. Co-transformation of genes can be carried out using single transformation vectors comprising multiple genes or genes carried separately on multiple vectors. If the sequences are stacked by genetically transforming the plants, the polynucleotide sequences of interest can be combined at any time and in any order. The traits can be introduced simultaneously in a co-transformation protocol with the polynucleotides of interest provided by any combination of transformation cassettes. For example, if two sequences will be introduced, the two sequences can be contained in separate transformation cassettes (trans) or contained on the same transformation cassette (cis). Expression of the sequences can be driven by the same promoter or by different promoters. In certain cases, it may be desirable to introduce a transformation cassette that will suppress the expression of the polynucleotide of interest. This may be combined with any combination of other suppression cassettes or overexpression cassettes to generate the desired combination of traits in the plant. It is further recognized that polynucleotide sequences can be stacked at a desired genomic location using a site-specific recombination system. See, for example, WO 1999/25821, WO 1999/25854, WO 1999/25840, WO 1999/25855 and WO 1999/25853, all of which are herein incorporated by reference.

[0274] In some embodiments the polynucleotides encoding the PtIP-83 polypeptide disclosed herein, alone or stacked with one or more additional insect resistance traits can be stacked with one or more additional input traits (e.g., herbicide resistance, fungal resistance, virus resistance, stress tolerance, disease resistance, male sterility, stalk strength, and the like) or output traits (e.g., increased yield, modified starches, improved oil profile, balanced amino acids, high lysine or methionine, increased digestibility, improved fiber quality, drought resistance, and the like). Thus, the polynucleotide embodiments can be used to provide a complete agronomic package of improved crop quality with the ability to flexibly and cost effectively control any number of agronomic pests.

Transgenes useful for stacking include but are not limited to:
1. Transgenes that Confer Resistance to Insects or Disease and that Encode:
[0275] (A) Plant disease resistance genes. Plant defenses are often activated by specific interaction between the product of a disease resistance gene (R) in the plant and the product of a corresponding avirulence (Avr) gene in the pathogen. A plant variety can be transformed with cloned resistance gene to engineer plants that are resistant to specific pathogen strains. See, for example, Jones, et al., (1994) Science 266:789 (cloning of the tomato Cf-9 gene for resistance to Cladosporium fulvum); Martin, et al., (1993) Science 262:1432 (tomato Pto gene for resistance to Pseudomonas syringae pv. tomato encodes a protein kinase); Mindrinos, et al., (1994) Cell 78:1089 (Arabidopsis RSP2 gene for resistance to Pseudomonas syringae), McDowell and Woffenden, (2003) Trends Biotechnol. 21(4):178-83 and Toyoda, et al., (2002) Transgenic Res. 11(6):567-82. A plant resistant to a disease is one that is more resistant to a pathogen as compared to the wild type plant.
[0276] (B) Genes encoding a Bacillus thuringiensis protein, a derivative thereof or a synthetic polypeptide modeled thereon. See, for example, Geiser, et al., (1986) Gene 48:109, who disclose the cloning and nucleotide sequence of a Bt delta-endotoxin gene. Moreover, DNA molecules encoding delta-endotoxin genes can be purchased from American Type Culture Collection (Rockville, Md.), for example, under ATCC® Accession Numbers 40098, 67136, 31995 and 31998. Other non-limiting examples of Bacillus thuringiensis transgenes being genetically engineered are given in the following patents and patent applications and hereby are incorporated by reference for this purpose: U.S. Pat. Nos. 5,188,960; 5,689,052; 5,880,275; 5,986,177; 6,023,013, 6,060,594, 6,063,597, 6,077,824, 6,620,988, 6,642,030, 6,713,259, 6,893,826, 7,105,332; 7,179,965, 7,208,474; 7,227,056, 7,288,643, 7,323,556, 7,329,736, 7,449,552, 7,468,278, 7,510,878, 7,521,235, 7,544,862, 7,605,304, 7,696,412, 7,629,504, 7,705,216, 7,772,465, 7,790,846, 7,858,849 and WO 1991/14778; WO 1999/31248; WO 2001/12731; WO 1999/24581 and WO 1997/40162.
[0277] Genes encoding pesticidal proteins may also be stacked including but are not limited to: insecticidal proteins from Pseudomonas sp. such as PSEEN3174 (Monalysin, (2011) PLoS Pathogens, 7:1-13), from Pseudomonas protegens strain CHA0 and Pf-5 (previously fluorescens) (Pechy-Tarr, (2008) Environmental Microbiology 10:2368-2386: GenBank Accession No. EU400157); from Pseudomonas Taiwanensis (Liu, et al., (2010) J. Agric. Food Chem. 58:12343-12349) and from Pseudomonas pseudoalcligenes (Zhang, et al., (2009) Annals of Microbiology 59:45-50 and Li, et al., (2007) Plant Cell Tiss. Organ Cult. 89:159-168); insecticidal proteins from Photorhabdus sp. and Xenorhabdus sp. (Hinchliffe, et al., (2010) The Open Toxinology Journal 3:101-118 and Morgan, et al., (2001) Applied and Envir. Micro. 67:2062-2069), U.S. Pat. Nos. 6,048,838, and 6,379,946; a PIP-1 polypeptide of US Patent Publication US20140007292; an AfIP-1A and/or AfIP-1B polypeptide of US Patent Publication US20140033361; a PHI-4 polypeptide of US patent Publication US20140274885 or PCT Patent Publication WO2014/150914; a PIP-47 polypeptide of PCT Serial Number PCT/US14/51063, a PIP-72 polypeptide of PCT Serial Number PCT/US14/55128, and 5-endotoxins including, but not limited to, the Cry1, Cry2, Cry3, Cry4, Cry5, Cry6, Cry7, Cry8, Cry9, Cry10, Cry1I, Cry12, Cry13, Cry14, Cry15, Cry16, Cry17, Cry18, Cry19, Cry20, Cry21, Cry22, Cry23, Cry24, Cry25, Cry26, Cry27, Cry 28, Cry 29, Cry 30, Cry31, Cry32, Cry33, Cry34, Cry35, Cry36, Cry37, Cry38, Cry39, Cry40, Cry41, Cry42, Cry43, Cry44, Cry45, Cry 46, Cry47, Cry49, Cry50, Cry51, Cry52, Cry53, Cry 54, Cry55, Cry56, Cry57, Cry58, Cry59, Cry60, Cry61, Cry62, Cry63, Cry64, Cry65, Cry66, Cry67, Cry68, Cry69, Cry70, Cry71, and Cry 72 classes of 5-endotoxin genes and the B. thuringiensis cytolytic Cyt1 and Cyt2 genes. Members of these classes of B. thuringiensis insecticidal proteins include, but are not limited to Cry1Aa1 (Accession #AAA22353); Cry1Aa2 (Accession #Accession #AAA22552); Cry1Aa3 (Accession #BAA00257); Cry1Aa4 (Accession #CAA31886); Cry1Aa5 (Accession #BAA04468); Cry1Aa6 (Accession #AAA86265); Cry1Aa7 (Accession #AAD46139); Cry1Aa8 (Accession #I26149); Cry1Aa9 (Accession #BAA77213); Cry1Aa10 (Accession #AAD55382); Cry1Aa11 (Accession #CAA70856); Cry1Aa12 (Accession #AAP80146); Cry1Aa13 (Accession #AAM44305); Cry1Aa14 (Accession #AAP40639); Cry1Aa15 (Accession #AAY66993); Cry1Aa16 (Accession #HQ439776); Cry1Aa17 (Accession #HQ439788); Cry1Aa18 (Accession #HQ439790); Cry1Aa19 (Accession #HQ685121); Cry1Aa20 (Accession #JF340156); Cry1Aa21 (Accession #JN651496); Cry1Aa22 (Accession #KC158223); Cry1Ab1 (Accession #AAA22330); Cry1Ab2 (Accession #AAA22613); Cry1Ab3 (Accession #AAA22561); Cry1Ab4 (Accession #BAA00071); Cry1Ab5 (Accession #CAA28405); Cry1Ab6 (Accession #AAA22420); Cry1Ab7 (Accession #CAA31620); Cry1Ab8 (Accession #AAA22551); Cry1Ab9 (Accession #CAA38701); Cry1Ab10 (Accession #A29125); Cry1Ab11 (Accession #I12419); Cry1Ab12 (Accession #AAC64003); Cry1Ab13 (Accession #AAN76494); Cry1Ab14 (Accession #AAG16877); Cry1Ab15 (Accession #AA013302); Cry1Ab16 (Accession #AAK55546); Cry1Ab17 (Accession #AAT46415); Cry1Ab18 (Accession #AAQ88259); Cry1Ab19 (Accession #AAW31761); CrylAb20 (Accession #ABB72460); Cry1Ab21 (Accession #ABS18384); Cry1Ab22 (Accession #ABW87320); Cry1Ab23 (Accession #HQ439777); Cry1Ab24 (Accession #HQ439778); Cry1Ab25 (Accession #HQ685122); Cry1Ab26 (Accession #HQ847729); Cry1Ab27 (Accession #JN135249); Cry1Ab28 (Accession #JN135250); Cry1Ab29 (Accession #JN135251); Cry1Ab30 (Accession #JN135252); Cry1Ab31 (Accession #JN135253); Cry1Ab32 (Accession #JN135254); Cry1Ab33 (Accession #AAS93798); Cry1Ab34 (Accession #KC156668); Cry1Ab-like (Accession #AAK14336); Cry1Ab-like (Accession #AAK14337); Cry1Ab-like (Accession #AAK14338); Cry1Ab-like (Accession #ABG88858); Cry1Ac1 (Accession #AAA22331); Cry1Ac2 (Accession #AAA22338); Cry1Ac3 (Accession #CAA38098); Cry1Ac4 (Accession #AAA73077); Cry1Ac5 (Accession #AAA22339); Cry1Ac6 (Accession #AAA86266); Cry1Ac7 (Accession #AAB46989); Cry1Ac8 (Accession #AAC44841); Cry1Ac9 (Accession #AAB49768); Cry1Ac10 (Accession #CAA05505); Cry1Ac11 (Accession #CAA10270); Cry1Ac12 (Accession #I12418); Cry1Ac13 (Accession #AAD38701); Cry1Ac14 (Accession #AAQ06607); Cry1Ac15 (Accession #AAN07788); Cry1Ac16 (Accession #AAU87037); Cry1Ac17 (Accession #AAX18704); Cry1Ac18 (Accession #AAY88347); Cry1Ac19 (Accession #ABD37053); Cry1Ac20 (Accession #ABB89046); Cry1Ac21 (Accession #AAY66992); Cry1Ac22 (Accession #ABZ01836); Cry1Ac23 (Accession #CAQ30431); Cry1Ac24 (Accession #ABL01535); Cry1Ac25 (Accession #FJ513324); Cry1Ac26 (Accession #FJ617446); Cry1Ac27 (Accession #FJ617447); Cry1Ac28 (Accession #ACM90319); Cry1Ac29 (Accession #DQ438941); Cry1Ac30 (Accession #GQ227507); Cry1Ac31 (Accession #GU446674); Cry1Ac32 (Accession #HM061081); Cry1Ac33 (Accession #GQ866913); Cry1Ac34 (Accession #HQ230364); Cry1Ac35 (Accession #JF340157); Cry1Ac36 (Accession #JN387137); Cry1Ac37 (Accession #JQ317685); Cry1Ad1 (Accession #AAA22340); Cry1Ad2 (Accession #CAA01880); Cry1Ae1 (Accession #AAA22410); Cry1Af1 (Accession #AAB82749); Cry1Ag1 (Accession #AAD46137); Cry1Ah1 (Accession #AAQ14326); Cry1Ah2 (Accession #ABB76664); Cry1Ah3 (Accession #HQ439779); Cry1Ai1 (Accession #AA039719); Cry1Ai2 (Accession #HQ439780); Cry1A-like (Accession #AAK14339); Cry1Ba1 (Accession #CAA29898); Cry1Ba2 (Accession #CAA65003); Cry1 Ba3 (Accession #AAK63251); Cry1Ba4 (Accession #AAK51084); Cry1Ba5 (Accession #AB020894); Cry1Ba6 (Accession #ABL60921); Cry1Ba7 (Accession #HQ439781); Cry1Bb1 (Accession #AAA22344); Cry1Bb2 (Accession #HQ439782); Cry1Bc1 (Accession #CAA86568); Cry1Bd1 (Accession #AAD10292); Cry1Bd2 (Accession #AAM93496); Cry1Be1 (Accession #AAC32850); Cry1 Be2 (Accession #AAQ52387); Cry1 Be3 (Accession #ACV96720); Cry1Be4 (Accession #HM070026); Cry1Bf1 (Accession #CAC50778); Cry1Bf2 (Accession #AAQ52380); Cry1Bg1 (Accession #AA039720); Cry1Bh1 (Accession #HQ589331); Cry1Bi1 (Accession #KC156700); Cry1Ca1 (Accession #CAA30396); Cry1Ca2 (Accession #CAA31951); Cry1Ca3 (Accession #AAA22343); Cry1Ca4 (Accession #CAA01886); Cry1Ca5 (Accession #CAA65457); Cry1Ca6 [1] (Accession #AAF37224); Cry1Ca7 (Accession #AAG50438); Cry1Ca8 (Accession #AAM00264); Cry1Ca9 (Accession #AAL79362); Cry1Ca10 (Accession #AAN16462); Cry1Ca11 (Accession #AAX53094); Cry1Ca12 (Accession #HM070027); Cry1Ca13 (Accession #HQ412621); Cry1Ca14 (Accession #JN651493); Cry1Cb1 (Accession #M97880); Cry1Cb2 (Accession #AAG35409); Cry1Cb3 (Accession #ACD50894); Cry1Cb-like (Accession #AAX63901); Cry1Da1 (Accession #CAA38099); Cry1Da2 (Accession #I76415); Cry1Da3 (Accession #HQ439784); Cry1db1 (Accession #CAA80234); Cry1db2 (Accession #AAK48937); Cry1Dc1 (Accession #ABK35074); Cry1 Ea1 (Accession #CAA37933); Cry1 Ea2 (Accession #CAA39609); Cry1Ea3 (Accession #AAA22345); Cry1Ea4 (Accession #AAD04732); Cry1Ea5 (Accession #A15535); Cry1Ea6 (Accession #AAL50330); Cry1Ea7 (Accession #AAW72936); Cry1Ea8 (Accession #ABX11258); Cry1Ea9 (Accession #HQ439785); Cry1Ea10 (Accession #ADR00398); Cry1Ea11 (Accession #JQ652456); Cry1Eb1 (Accession #AAA22346); Cry1Fa1 (Accession #AAA22348); Cry1Fa2 (Accession #AAA22347); Cry1Fa3 (Accession #HM070028); Cry1Fa4 (Accession #HM439638); Cry1 Fb1 (Accession #CAA80235); Cry1Fb2 (Accession #BAA25298); Cry1Fb3 (Accession #AAF21767); Cry1Fb4 (Accession #AAC10641); Cry1Fb5 (Accession #AAO13295); Cry1Fb6 (Accession #ACD50892); Cry1Fb7 (Accession #ACD50893); Cry1Ga1 (Accession #CAA80233); Cry1Ga2 (Accession #CAA70506); Cry1Gb1 (Accession #AAD10291); Cry1Gb2 (Accession #AA013756); Cry1Gc1 (Accession #AAQ52381); Cry1Ha1 (Accession #CAA80236); Cry1Hb1 (Accession #AAA79694); Cry1Hb2 (Accession #HQ439786); Cry1H-like (Accession #AAF01213); Cry1Ia1 (Accession #CAA44633); Cry1Ia2 (Accession #AAA22354); Cry1Ia3 (Accession #AAC36999); Cry1Ia4 (Accession #AAB00958); Cry1Ia5 (Accession #CAA70124); Cry1Ia6 (Accession #AAC26910); Cry1Ia7 (Accession #AAM73516); Cry1Ia8 (Accession #AAK66742); Cry1Ia9 (Accession #AAQ08616); Cry1Ia10 (Accession #AAP86782); Cry1Ia11 (Accession #CAC85964); Cry1Ia12 (Accession #AAV53390); Cry1Ia13 (Accession #ABF83202); Cry1Ia14 (Accession #ACG63871); Cry1Ia15 (Accession #FJ617445); Cry1Ia16 (Accession #FJ617448); Cry1Ia17 (Accession #GU989199); Cry1Ia18 (Accession #ADK23801); Cry1Ia19 (Accession #HQ439787); Cry1Ia20 (Accession #JQ228426); Cry1Ia21 (Accession #JQ228424); Cry1Ia22 (Accession #JQ228427); Cry1Ia23 (Accession #JQ228428); Cry1Ia24 (Accession #JQ228429); Cry1Ia25 (Accession #JQ228430); Cry1Ia26 (Accession #JQ228431); Cry1Ia27 (Accession #JQ228432); Cry1Ia28 (Accession #JQ228433); Cry1Ia29 (Accession #JQ228434); Cry1Ia30 (Accession #JQ317686); Cry1Ia31 (Accession #JX944038); Cry1Ia32 (Accession #JX944039); Cry1Ia33 (Accession #JX944040); Cry1Ib1 (Accession #AAA82114); Cry1Ib2 (Accession #ABW88019); Cry1Ib3 (Accession #ACD75515); Cry1Ib4 (Accession #HM051227); Cry1Ib5 (Accession #HM070028); Cry1Ib6 (Accession #ADK38579); Cry1Ib7 (Accession #JN571740); Cry1Ib8 (Accession #JN675714); Cry1Ib9 (Accession #JN675715); Cry1Ib10 (Accession #JN675716); Cry1Ib11 (Accession #JQ228423); Cry1Ic1 (Accession #AAC62933); Cry1Ic2 (Accession #AAE71691); Cry1Id1 (Accession #AAD44366); Cry1Id2 (Accession #JQ228422); Cry1Ie1 (Accession #AAG43526); Cry1Ie2 (Accession #HM439636); Cry1Ie3 (Accession #KC156647); Cry1Ie4 (Accession #KC156681); Cry1If1 (Accession #AAQ52382); Cry1Ig1 (Accession #KC156701); Cry1I-like (Accession #AAC31094); Cry1I-like (Accession #ABG88859); Cry1Ja1 (Accession #AAA22341); Cry1Ja2 (Accession #HM070030); Cry1Ja3 (Accession #JQ228425); Cry1Jb1 (Accession #AAA98959); Cry1Jc1 (Accession #AAC31092); Cry1Jc2 (Accession #AAQ52372); Cry1Jd1 (Accession #CAC50779); Cry1Ka1 (Accession #AAB00376); Cry1 Ka2 (Accession #HQ439783); Cry1La1 (Accession #AAS60191); Cry1La2 (Accession #HM070031); Cry1Ma1 (Accession #FJ884067); Cry1Ma2 (Accession #KC156659); Cry1Na1 (Accession #KC156648); Cry1Nb1 (Accession #KC156678); Cry1-like (Accession #AAC31091); Cry2Aa1 (Accession #AAA22335); Cry2Aa2 (Accession #AAA83516); Cry2Aa3 (Accession #D86064); Cry2Aa4 (Accession #AAC04867); Cry2Aa5 (Accession #CAA10671); Cry2Aa6 (Accession #CAA10672); Cry2Aa7 (Accession #CAA10670); Cry2Aa8 (Accession #AAO13734); Cry2Aa9 (Accession #AA013750); Cry2Aa10 (Accession #AAQ04263); Cry2Aa11 (Accession #AAQ52384); Cry2Aa12 (Accession #AB183671); Cry2Aa13 (Accession #ABL01536); Cry2Aa14 (Accession #ACF04939); Cry2Aa15 (Accession #JN426947); Cry2Ab1 (Accession #AAA22342); Cry2Ab2 (Accession #CAA39075); Cry2Ab3 (Accession #AAG36762); Cry2Ab4 (Accession #AAO13296); Cry2Ab5 (Accession #AAQ04609); Cry2Ab6 (Accession #AAP59457); Cry2Ab7 (Accession #AAZ66347); Cry2Ab8 (Accession #ABC95996); Cry2Ab9 (Accession #ABC74968); Cry2Ab10 (Accession #EF157306); Cry2Ab11 (Accession #CAM84575); Cry2Ab12 (Accession #ABM21764); Cry2Ab13 (Accession #ACG76120); Cry2Ab14 (Accession #ACG76121); Cry2Ab15 (Accession #HM037126); Cry2Ab16 (Accession #GQ866914); Cry2Ab17 (Accession #HQ439789); Cry2Ab18 (Accession #JN135255); Cry2Ab19 (Accession #JN135256); Cry2Ab20 (Accession #JN135257); Cry2Ab21 (Accession #JN135258); Cry2Ab22 (Accession #JN135259); Cry2Ab23 (Accession #JN135260); Cry2Ab24 (Accession #JN135261); Cry2Ab25 (Accession #JN415485); Cry2Ab26 (Accession #JN426946); Cry2Ab27 (Accession #JN415764); Cry2Ab28 (Accession #JN651494); Cry2Ac1 (Accession #CAA40536); Cry2Ac2 (Accession #AAG35410); Cry2Ac3 (Accession #AAQ52385); Cry2Ac4 (Accession #ABC95997); Cry2Ac5 (Accession #ABC74969); Cry2Ac6 (Accession #ABC74793); Cry2Ac7 (Accession #CAL18690); Cry2Ac8 (Accession #CAM09325); Cry2Ac9 (Accession #CAM09326); Cry2Ac10 (Accession #ABN15104); Cry2Ac11 (Accession #CAM83895); Cry2Ac12 (Accession #CAM83896); Cry2Ad1 (Accession #AAF09583); Cry2Ad2 (Accession #ABC86927); Cry2Ad3 (Accession #CAK29504); Cry2Ad4 (Accession #CAM32331); Cry2Ad5 (Accession #CA078739); Cry2Ae1 (Accession #AAQ52362); Cry2Af1 (Accession #AB030519); Cry2Af2 (Accession #GQ866915); Cry2Ag1 (Accession #ACH91610); Cry2Ah1 (Accession #EU939453); Cry2Ah2 (Accession #ACL80665); Cry2Ah3 (Accession #GU073380); Cry2Ah4 (Accession #KC156702); Cry2Ai1 (Accession #FJ788388); Cry2Aj (Accession #); Cry2Ak1 (Accession #KC156660); Cry2Ba1 (Accession #KC156658); Cry3Aa1 (Accession #AAA22336); Cry3Aa2 (Accession #AAA22541); Cry3Aa3 (Accession #CAA68482); Cry3Aa4 (Accession #AAA22542); Cry3Aa5 (Accession #AAA50255); Cry3Aa6 (Accession #AAC43266); Cry3Aa7 (Accession #CAB41411); Cry3Aa8 (Accession #AAS79487); Cry3Aa9 (Accession #AAW05659); Cry3Aa10 (Accession #AAU29411); Cry3Aa11 (Accession #AAW82872); Cry3Aa12 (Accession #ABY49136); Cry3Ba1 (Accession #CAA34983); Cry3Ba2 (Accession #CAA00645); Cry3Ba3 (Accession #JQ397327); Cry3Bb1 (Accession #AAA22334); Cry3Bb2 (Accession #AAA74198); Cry3Bb3 (Accession #I15475); Cry3Ca1 (Accession #CAA42469); Cry4Aa1 (Accession #CAA68485); Cry4Aa2 (Accession #BAA00179); Cry4Aa3 (Accession #CAD30148); Cry4Aa4 (Accession #AFB18317); Cry4A-like (Accession #AAY96321); Cry4Ba1 (Accession #CAA30312); Cry4Ba2 (Accession #CAA30114); Cry4Ba3 (Accession #AAA22337); Cry4Ba4 (Accession #BAA00178); Cry4Ba5 (Accession #CAD30095); Cry4Ba-like (Accession #ABC47686); Cry4Ca1 (Accession #EU646202); Cry4Cb1 (Accession #FJ403208); Cry4Cb2 (Accession #FJ597622); Cry4Cc1 (Accession #FJ403207); Cry5Aa1 (Accession #AAA67694); Cry5Ab1 (Accession #AAA67693); Cry5Ac1 (Accession #I34543); Cry5Ad1 (Accession #ABQ82087); Cry5Ba1 (Accession #AAA68598); Cry5Ba2 (Accession #ABW88931); Cry5Ba3 (Accession #AFJ04417); Cry5Ca1 (Accession #HM461869); Cry5Ca2 (Accession #ZP_04123426); Cry5Da1 (Accession #HM461870); Cry5Da2 (Accession #ZP_04123980); Cry5Ea1 (Accession #HM485580); Cry5Ea2 (Accession #ZP_04124038); Cry6Aa1 (Accession #AAA22357); Cry6Aa2 (Accession #AAM46849); Cry6Aa3 (Accession #ABH03377); Cry6Ba1 (Accession #AAA22358); Cry7Aa1 (Accession #AAA22351); Cry7Ab1 (Accession #AAA21120); Cry7Ab2 (Accession #AAA21121); Cry7Ab3 (Accession #ABX24522); Cry7Ab4 (Accession #EU380678); Cry7Ab5 (Accession #ABX79555); Cry7Ab6 (Accession #AC144005); Cry7Ab7 (Accession #ADB89216); Cry7Ab8 (Accession #GU145299); Cry7Ab9 (Accession #ADD92572); Cry7Ba1 (Accession #ABB70817); Cry7Bb1 (Accession #KC156653); Cry7Ca1 (Accession #ABR67863); Cry7Cb1 (Accession #KC156698); Cry7Da1 (Accession #ACQ99547); Cry7Da2 (Accession #HM572236); Cry7Da3 (Accession #KC156679); Cry7Ea1 (Accession #HM035086); Cry7Ea2 (Accession #HM132124); Cry7Ea3 (Accession #EEM19403); Cry7Fa1 (Accession #HM035088); Cry7Fa2 (Accession #EEM19090); Cry7Fb1 (Accession #HM572235); Cry7Fb2 (Accession #KC156682); Cry7Ga1 (Accession #HM572237); Cry7Ga2 (Accession #KC156669); Cry7Gb1 (Accession #KC156650); Cry7Gc1 (Accession #KC156654); Cry7Gd1 (Accession #KC156697); Cry7Ha1 (Accession #KC156651); Cry7Ia1 (Accession #KC156665); Cry7Ja1 (Accession #KC156671); Cry7Ka1 (Accession #KC156680); Cry7Kb1 (Accession #BAM99306); Cry7La1 (Accession #BAM99307); Cry8Aa1 (Accession #AAA21117); Cry8Ab1 (Accession #EU044830); Cry8Ac1 (Accession #KC156662); Cry8Ad1 (Accession #KC156684); Cry8Ba1 (Accession #AAA21118); Cry8Bb1 (Accession #CAD57542); Cry8Bc1 (Accession #CAD57543); Cry8Ca1 (Accession #AAA21119); Cry8Ca2 (Accession #AAR98783); Cry8Ca3 (Accession #EU625349); Cry8Ca4 (Accession #ADB54826); Cry8Da1 (Accession #BAC07226); Cry8Da2 (Accession #BD133574); Cry8Da3 (Accession #BD133575); Cry8db1 (Accession #BAF93483); Cry8Ea1 (Accession #AAQ73470); Cry8Ea2 (Accession #EU047597); Cry8Ea3 (Accession #KC855216); Cry8Fa1 (Accession #AAT48690); Cry8Fa2 (Accession #HQ174208); Cry8Fa3 (Accession #AFH78109); Cry8Ga1 (Accession #AAT46073); Cry8Ga2 (Accession #ABC42043); Cry8Ga3 (Accession #FJ198072); Cry8Ha1 (Accession #AAW81032); Cry8Ia1 (Accession #EU381044); Cry8Ia2 (Accession #GU073381); Cry8Ia3 (Accession #HM044664); Cry8Ia4 (Accession #KC156674); Cry8Ib1 (Accession #GU325772); Cry8Ib2 (Accession #KC156677); Cry8Ja1 (Accession #EU625348); Cry8Ka1 (Accession #FJ422558); Cry8Ka2 (Accession #ACN87262); Cry8Kb1 (Accession #HM123758); Cry8Kb2 (Accession #KC156675); Cry8La1 (Accession #GU325771); Cry8Ma1 (Accession #HM044665); Cry8Ma2 (Accession #EEM86551); Cry8Ma3 (Accession #HM210574); Cry8Na1 (Accession #HM640939); Cry8Pa1 (Accession #HQ388415); Cry8Qa1 (Accession #HQ441166); Cry8Qa2 (Accession #KC152468); Cry8Ra1 (Accession #AFP87548); Cry8Sa1 (Accession #JQ740599); Cry8Ta1 (Accession #KC156673); Cry8-like (Accession #FJ770571); Cry8-like (Accession #ABS53003); Cry9Aa1 (Accession #CAA41122); Cry9Aa2 (Accession #CAA41425); Cry9Aa3 (Accession #GQ249293); Cry9Aa4 (Accession #GQ249294); Cry9Aa5 (Accession #JX174110); Cry9Aa like (Accession #AAQ52376); Cry9Ba1 (Accession #CAA52927); Cry9Ba2 (Accession #GU299522); Cry9Bb1 (Accession #AAV28716); Cry9Ca1 (Accession #CAA85764); Cry9Ca2 (Accession #AAQ52375); Cry9Da1 (Accession #BAA19948); Cry9Da2 (Accession #AAB97923); Cry9Da3 (Accession #GQ249293); Cry9Da4 (Accession #GQ249297); Cry9db1 (Accession #AAX78439); Cry9Dc1 (Accession #KC156683); Cry9Ea1 (Accession #BAA34908); Cry9Ea2 (Accession #AA012908); Cry9Ea3 (Accession #ABM21765); Cry9Ea4 (Accession #ACE88267); Cry9Ea5 (Accession #ACF04743); Cry9Ea6 (Accession #ACG63872); Cry9Ea7 (Accession #FJ380927); Cry9Ea8 (Accession #GQ249292); Cry9Ea9 (Accession #JN651495); Cry9Eb1 (Accession #CAC50780); Cry9Eb2 (Accession #GQ249298); Cry9Eb3 (Accession #KC156646); Cry9Ec1 (Accession #AAC63366); Cry9Ed1 (Accession #AAX78440); Cry9Ee1 (Accession #GQ249296); Cry9Ee2 (Accession #KC156664); Cry9Fa1 (Accession #KC156692); Cry9Ga1 (Accession #KC156699); Cry9-like (Accession #AAC63366); Cry10Aa1 (Accession #AAA22614); Cry10Aa2 (Accession #E00614); Cry10Aa3 (Accession #CAD30098); Cry10Aa4 (Accession #AFB18318); Cry10A-like (Accession #DQ167578); Cry11Aa1 (Accession #AAA22352); Cry11Aa2 (Accession #AAA22611); Cry11Aa3 (Accession #CAD30081); Cry11Aa4 (Accession #AFB18319); Cry11Aa-like (Accession #DQ166531); Cry11Ba1 (Accession #CAA60504); Cry11Bb1 (Accession #AAC97162); Cry11Bb2 (Accession #HM068615); Cry12Aa1 (Accession #AAA22355); Cry13Aa1 (Accession #AAA22356); Cry14Aa1 (Accession #AAA21516); Cry14Ab1 (Accession #KC156652); Cry15Aa1 (Accession #AAA22333); Cry16Aa1 (Accession #CAA63860); Cry17Aa1 (Accession #CAA67841); Cry18Aa1 (Accession #CAA67506); Cry18Ba1 (Accession #AAF89667); Cry18Ca1 (Accession #AAF89668); Cry19Aa1 (Accession #CAA68875); Cry19Ba1 (Accession #BAA32397); Cry19Ca1 (Accession #AFM37572); Cry20Aa1 (Accession #AAB93476); Cry20Ba1 (Accession #ACS93601); Cry20Ba2 (Accession #KC156694); Cry20-like (Accession #GQ144333); Cry21Aa1 (Accession #I32932); Cry21Aa2 (Accession #I66477); Cry21Ba1 (Accession #BAC06484); Cry21Ca1 (Accession #JF521577); Cry21Ca2 (Accession #KC156687); Cry21Da1 (Accession #JF521578); Cry22Aa1 (Accession #I34547); Cry22Aa2 (Accession #CAD43579); Cry22Aa3 (Accession #ACD93211); Cry22Ab1 (Accession #AAK50456); Cry22Ab2 (Accession #CAD43577); Cry22Ba1 (Accession #CAD43578); Cry22Bb1 (Accession #KC156672); Cry23Aa1 (Accession #AAF76375); Cry24Aa1 (Accession #AAC61891); Cry24Ba1 (Accession #BAD32657); Cry24Ca1 (Accession #CAJ43600); Cry25Aa1 (Accession #AAC61892); Cry26Aa1 (Accession #AAD25075); Cry27Aa1 (Accession #BAA82796); Cry28Aa1 (Accession #AAD24189); Cry28Aa2 (Accession #AAG00235); Cry29Aa1 (Accession #CAC80985); Cry30Aa1 (Accession #CAC80986); Cry30Ba1 (Accession #BAD00052); Cry30Ca1 (Accession #BAD67157); Cry30Ca2 (Accession #ACU24781); Cry30Da1 (Accession #EF095955); Cry30db1 (Accession #BAE80088); Cry30Ea1 (Accession #ACC95445); Cry30Ea2 (Accession #FJ499389); Cry30Fa1 (Accession #AC122625); Cry30Ga1 (Accession #ACG60020); Cry30Ga2 (Accession #HQ638217); Cry31Aa1 (Accession #BAB11757); Cry31Aa2 (Accession #AAL87458); Cry31Aa3 (Accession #BAE79808); Cry31Aa4 (Accession #BAF32571); Cry31Aa5 (Accession #BAF32572); Cry31Aa6 (Accession #BAI44026); Cry31Ab1 (Accession #BAE79809); Cry31Ab2 (Accession #BAF32570); Cry31Ac1 (Accession #BAF34368); Cry31Ac2 (Accession #AB731600); Cry31Ad1 (Accession #BAI44022); Cry32Aa1 (Accession #AAG36711); Cry32Aa2 (Accession #GU063849); Cry32Ab1 (Accession #GU063850); Cry32Ba1 (Accession #BAB78601); Cry32Ca1 (Accession #BAB78602); Cry32Cb1 (Accession #KC156708); Cry32Da1 (Accession #BAB78603); Cry32Ea1 (Accession #GU324274); Cry32Ea2 (Accession #KC156686); Cry32Eb1 (Accession #KC156663); Cry32Fa1 (Accession #KC156656); Cry32Ga1 (Accession #KC156657); Cry32Ha1 (Accession #KC156661); Cry32Hb1 (Accession #KC156666); Cry321a1 (Accession #KC156667); Cry32Ja1 (Accession #KC156685); Cry32Ka1 (Accession #KC156688); Cry32La1 (Accession #KC156689); Cry32Ma1 (Accession #KC156690); Cry32Mb1 (Accession #KC156704); Cry32Na1 (Accession #KC156691); Cry32Oa1 (Accession #KC156703); Cry32Pa1 (Accession #KC156705); Cry32Qa1 (Accession #KC156706); Cry32Ra1 (Accession #KC156707); Cry32Sa1 (Accession #KC156709); Cry32Ta1 (Accession #KC156710); Cry32Ua1 (Accession #KC156655); Cry33Aa1 (Accession #AAL26871); Cry34Aa1 (Accession #AAG50341); Cry34Aa2 (Accession #AAK64560); Cry34Aa3 (Accession #AAT29032); Cry34Aa4 (Accession #AAT29030); Cry34Ab1 (Accession #AAG41671); Cry34Ac1 (Accession #AAG50118); Cry34Ac2 (Accession #AAK64562); Cry34Ac3 (Accession #AAT29029); Cry34Ba1 (Accession #AAK64565); Cry34Ba2 (Accession #AAT29033); Cry34Ba3 (Accession #AAT29031); Cry35Aa1 (Accession #AAG50342); Cry35Aa2 (Accession #AAK64561); Cry35Aa3 (Accession #AAT29028); Cry35Aa4 (Accession #AAT29025); Cry35Ab1 (Accession #AAG41672); Cry35Ab2 (Accession #AAK64563); Cry35Ab3 (Accession #AY536891); Cry35Ac1 (Accession #AAG50117); Cry35Ba1 (Accession #AAK64566); Cry35Ba2 (Accession #AAT29027); Cry35Ba3 (Accession #AAT29026); Cry36Aa1 (Accession #AAK64558); Cry37Aa1 (Accession #AAF76376); Cry38Aa1 (Accession #AAK64559); Cry39Aa1 (Accession #BAB72016); Cry40Aa1 (Accession #BAB72018); Cry40Ba1 (Accession #BAC77648); Cry40Ca1 (Accession #EU381045); Cry40Da1 (Accession #ACF15199); Cry41Aa1 (Accession #BAD35157); Cry41Ab1 (Accession #BAD35163); Cry41Ba1 (Accession #HM461871); Cry41Ba2 (Accession #ZP_04099652); Cry42Aa1 (Accession #BAD35166); Cry43Aa1 (Accession #BAD15301); Cry43Aa2 (Accession #BAD95474); Cry43Ba1 (Accession #BAD15303); Cry43Ca1 (Accession #KC156676); Cry43Cb1 (Accession #KC156695); Cry43Cc1 (Accession #KC156696); Cry43-like (Accession #BAD15305); Cry44Aa (Accession #BAD08532); Cry45Aa (Accession #BAD22577); Cry46Aa (Accession #BAC79010); Cry46Aa2 (Accession #BAG68906); Cry46Ab (Accession #BAD35170); Cry47Aa (Accession #AAY24695); Cry48Aa (Accession #CAJ18351); Cry48Aa2 (Accession #CAJ86545); Cry48Aa3 (Accession #CAJ86546); Cry48Ab (Accession #CAJ86548); Cry48Ab2 (Accession #CAJ86549); Cry49Aa (Accession #CAH56541); Cry49Aa2 (Accession #CAJ86541); Cry49Aa3 (Accession #CAJ86543); Cry49Aa4 (Accession #CAJ86544); Cry49Ab1 (Accession #CAJ86542); Cry50Aa1 (Accession #BAE86999); Cry50Ba1 (Accession #GU446675); Cry50Ba2 (Accession #GU446676); Cry51Aa1 (Accession #AB114444); Cry51Aa2 (Accession #GU570697); Cry52Aa1 (Accession #EF613489); Cry52Ba1 (Accession #FJ361760); Cry53Aa1 (Accession #EF633476); Cry53Ab1 (Accession #FJ361759); Cry54Aa1 (Accession #ACA52194); Cry54Aa2 (Accession #GQ140349); Cry54Ba1 (Accession #GU446677); Cry55Aa1 (Accession #ABW88932); Cry54Ab1 (Accession #JQ916908); Cry55Aa2 (Accession #AAE33526); Cry56Aa1 (Accession #ACU57499); Cry56Aa2 (Accession #GQ483512); Cry56Aa3 (Accession #JX025567); Cry57Aa1 (Accession #ANC87261); Cry58Aa1 (Accession #ANC87260); Cry59Ba1 (Accession #JN790647); Cry59Aa1 (Accession #ACR43758); Cry60Aa1 (Accession #ACU24782); Cry60Aa2 (Accession #EAO57254); Cry60Aa3 (Accession #EEM99278); Cry60Ba1 (Accession #GU810818); Cry60Ba2 (Accession #EAO57253); Cry60Ba3 (Accession #EEM99279); Cry61Aa1 (Accession #HM035087); Cry61Aa2 (Accession #HM132125); Cry61Aa3 (Accession #EEM19308); Cry62Aa1 (Accession #HM054509); Cry63Aa1 (Accession #BAI44028); Cry64Aa1 (Accession #BAJ05397); Cry65Aa1 (Accession #HM461868); Cry65Aa2 (Accession #ZP_04123838); Cry66Aa1 (Accession #HM485581); Cry66Aa2 (Accession #ZP_04099945); Cry67Aa1 (Accession #HM485582); Cry67Aa2 (Accession #ZP_04148882); Cry68Aa1 (Accession #HQ113114); Cry69Aa1 (Accession #HQ401006); Cry69Aa2 (Accession #JQ821388); Cry69Ab1 (Accession #JN209957); Cry70Aa1 (Accession #JN646781); Cry70Ba1 (Accession #ADO51070); Cry70Bb1 (Accession #EEL67276); Cry71Aa1 (Accession #JX025568); Cry72Aa1 (Accession #JX025569).

[0278] Examples of δ-endotoxins also include but are not limited to Cry1A proteins of U.S. Pat. Nos. 5,880,275 and 7,858,849; a DIG-3 or DIG-11 toxin (N-terminal deletion of α-helix 1 and/or α-helix 2 variants of Cry proteins such as Cry1A) of U.S. Pat. Nos. 8,304,604 and 8,304,605, Cry1B of U.S. patent application Ser. No. 10/525,318; Cry1C of U.S. Pat. No. 6,033,874; Cry1F of U.S. Pat. Nos. 5,188,960, 6,218,188; Cry1A/F chimeras of U.S. Pat. Nos. 7,070,982; 6,962,705 and 6,713,063); a Cry2 protein such as Cry2Ab protein of U.S. Pat. No. 7,064,249); a Cry3A protein including but not limited to an engineered hybrid insecticidal protein (eHIP) created by fusing unique combinations of variable regions and conserved blocks of at least two different Cry proteins (US Patent Application Publication Number 2010/0017914); a Cry4 protein; a Cry5 protein; a Cry6 protein; Cry8 proteins of U.S. Pat. Nos. 7,329,736, 7,449,552, 7,803,943, 7,476,781, 7,105,332, 7,378,499 and 7,462,760; a Cry9 protein such as such as members of the Cry9A, Cry9B, Cry9C, Cry9D, Cry9E, and Cry9F families; a Cry15 protein of Naimov, et al., (2008) Applied and Environmental Microbiology 74:7145-7151; a Cry22, a Cry34Ab1 protein of U.S. Pat. Nos. 6,127,180, 6,624,145 and 6,340,593; a CryET33 and CryET34 protein of U.S. Pat. Nos. 6,248,535, 6,326,351, 6,399,330, 6,949,626, 7,385,107 and 7,504,229; a CryET33 and CryET34 homologs of US Patent Publication Number 2006/0191034, 2012/0278954, and PCT Publication Number WO 2012/139004; a Cry35Ab1 protein of U.S. Pat. Nos. 6,083,499, 6,548,291 and 6,340,593; a Cry46 protein, a Cry 51 protein, a Cry binary toxin; a TIC901 or related toxin; TIC807 of US 2008/0295207; ET29, ET37, TIC809, TIC810, TIC812, TIC127, TIC128 of PCT US 2006/033867; AXMI-027, AXMI-036, and AXMI-038 of U.S. Pat. No. 8,236,757; AXMI-031, AXMI-039, AXMI-040, AXMI-049 of U.S. Pat. No. 7,923,602; AXMI-018, AXMI-020, and AXMI-021 of WO 2006/083891; AXMI-010 of WO 2005/038032; AXMI-003 of WO 2005/021585; AXMI-008 of US 2004/0250311; AXMI-006 of US 2004/0216186; AXMI-007 of US 2004/0210965; AXMI-009 of US 2004/0210964; AXMI-014 of US 2004/0197917; AXMI-004 of US 2004/0197916; AXMI-028 and AXMI-029 of WO 2006/119457; AXMI-007, AXMI-008, AXMI-0080rf2, AXMI-009, AXMI-014 and AXMI-004 of WO 2004/074462; AXMI-150 of U.S. Pat. No. 8,084,416; AXMI-205 of US20110023184; AXMI-011, AXMI-012, AXMI-013, AXMI-015, AXMI-019, AXMI-044, AXMI-037, AXMI-043, AXMI-033, AXMI-034, AXMI-022, AXMI-023, AXMI-041, AXMI-063, and AXMI-064 of US 2011/0263488; AXMI-R1 and related proteins of US 2010/0197592; AXMI221Z, AXMI222z, AXMI223z, AXMI224z and AXMI225z of WO 2011/103248; AXMI218, AXMI219, AXMI220, AXMI226, AXMI227, AXMI228, AXMI229, AXMI230, and AXMI231 of WO11/103247; AXMI-115, AXMI-113, AXMI-005, AXMI-163 and AXMI-184 of U.S. Pat. No. 8,334,431; AXMI-001, AXMI-002, AXMI-030, AXMI-035, and AXMI-045 of US 2010/0298211; AXMI-066 and AXMI-076 of US20090144852; AXMI128, AXMI130, AXMI131, AXMI133, AXMI140, AXMI141, AXMI142, AXMI143, AXMI144, AXMI146, AXMI148, AXMI149, AXMI152, AXMI153, AXMI154, AXMI155, AXMI156, AXMI157, AXMI158, AXMI162, AXMI165, AXMI166, AXMI167, AXMI168, AXMI169, AXMI170, AXMI171, AXMI172, AXMI173, AXMI174, AXMI175, AXMI176, AXMI177, AXMI178, AXMI179, AXMI180, AXMI181, AXMI182, AXMI185, AXMI186, AXMI187, AXMI188, AXMI189 of U.S. Pat. No. 8,318,900; AXMI079, AXMI080, AXMI081, AXMI082, AXMI091, AXMI092, AXMI096, AXMI097, AXMI098, AXMI099, AXMI100, AXMI101, AXMI102, AXMI103, AXMI104, AXMI107, AXMI108, AXMI109, AXMI110, AXMI111, AXMI112, AXMI114, AXMI116, AXMI117, AXMI118, AXMI119, AXMI120, AXMI121, AXMI122, AXMI123, AXMI124, AXMI1257, AXMI1268, AXMI127, AXMI129, AXMI164, AXMI151, AXMI161, AXMI183, AXMI132, AXMI138, AXMI137 of US 2010/0005543; and Cry proteins such as Cry1A and Cry3A having modified proteolytic sites of U.S. Pat. No. 8,319,019; and a Cry1Ac, Cry2Aa and Cry1Ca toxin protein from Bacillus thuringiensis strain VBTS 2528 of US Patent Application Publication Number 2011/0064710. Other Cry proteins are well known to one skilled in the art (see, Crickmore, et al., “Bacillus thuringiensis toxin nomenclature” (2011), at lifesci.sussex.ac.uk/home/Neil_Crickmore/Bt/ which can be accessed on the world-wide web using the “www” prefix). The insecticidal activity of Cry proteins is well known to one skilled in the art (for review, see, van Frannkenhuyzen, (2009) J. Invert. Path. 101:1-16). The use of Cry proteins as transgenic plant traits is well known to one skilled in the art and Cry-transgenic plants including but not limited to Cry1Ac, Cry1Ac+Cry2Ab, Cry1Ab, Cry1A.105, Cry1F, Cry1Fa2, Cry1F+Cry1Ac, Cry2Ab, Cry3A, mCry3A, Cry3Bb1, Cry34Ab1, Cry35Ab1, Vip3A, mCry3A, Cry9c and CBI-Bt have received regulatory approval (see, Sanahuja, (2011) Plant Biotech Journal 9:283-300 and the CERA (2010) GM Crop Database Center for Environmental Risk Assessment (CERA), ILSI Research Foundation, Washington D.C. at cera-gmc.org/index.php?action=gm_crop_database which can be accessed on the world-wide web using the “www” prefix). More than one pesticidal proteins well known to one skilled in the art can also be expressed in plants such as Vip3Ab & Cry1Fa (US2012/0317682), Cry1BE & Cry1F (US2012/0311746), Cry1CA & Cry1AB (US2012/0311745), Cry1F & CryCa (US2012/0317681), Cry1DA & Cry1BE (US2012/0331590), Cry1DA & Cry1Fa (US2012/0331589), Cry1AB & Cry1BE (US2012/0324606), and Cry1Fa & Cry2Aa, Cry1I or Cry1E (US2012/0324605). Pesticidal proteins also include insecticidal lipases including lipid acyl hydrolases of U.S. Pat. No. 7,491,869, and cholesterol oxidases such as from Streptomyces (Purcell et al. (1993) Biochem Biophys Res Commun 15:1406-1413). Pesticidal proteins also include VIP (vegetative insecticidal proteins) toxins of U.S. Pat. Nos. 5,877,012, 6,107,279, 6,137,033, 7,244,820, 7,615,686, and 8,237,020, and the like. Other VIP proteins are well known to one skilled in the art (see, lifesci.sussex.ac.uk/home/Neil_Crickmore/Bt/vip.html which can be accessed on the world-wide web using the “www” prefix). Pesticidal proteins also include toxin complex (TC) proteins, obtainable from organisms such as Xenorhabdus, Photorhabdus and Paenibacillus (see, U.S. Pat. Nos. 7,491,698 and 8,084,418). Some TC proteins have “stand alone” insecticidal activity and other TC proteins enhance the activity of the stand-alone toxins produced by the same given organism. The toxicity of a “stand-alone” TC protein (from Photorhabdus, Xenorhabdus or Paenibacillus, for example) can be enhanced by one or more TC protein “potentiators” derived from a source organism of a different genus. There are three main types of TC proteins. As referred to herein, Class A proteins (“Protein A”) are stand-alone toxins. Class B proteins (“Protein B”) and Class C proteins (“Protein C”) enhance the toxicity of Class A proteins. Examples of Class A proteins are TcbA, TcdA, XptA1 and XptA2. Examples of Class B proteins are TcaC, TcdB, XptB1Xb and XptC1Wi. Examples of Class C proteins are TccC, XptC1Xb and XptB1Wi. Pesticidal proteins also include spider, snake and scorpion venom proteins. Examples of spider venom peptides include but are not limited to lycotoxin-1 peptides and mutants thereof (U.S. Pat. No. 8,334,366).
[0279] (C) A polynucleotide encoding an insect-specific hormone or pheromone such as an ecdysteroid and juvenile hormone, a variant thereof, a mimetic based thereon or an antagonist or agonist thereof. See, for example, the disclosure by Hammock, et al., (1990) Nature 344:458, of baculovirus expression of cloned juvenile hormone esterase, an inactivator of juvenile hormone.
[0280] (D) A polynucleotide encoding an insect-specific peptide which, upon expression, disrupts the physiology of the affected pest. For example, see the disclosures of, Regan, (1994) J. Biol. Chem. 269:9 (expression cloning yields DNA coding for insect diuretic hormone receptor); Pratt, et al., (1989) Biochem. Biophys. Res. Comm. 163:1243 (an allostatin is identified in Diploptera puntata); Chattopadhyay, et al., (2004) Critical Reviews in Microbiology 30(1):33-54; Zjawiony, (2004) J Nat Prod 67(2):300-310; Carlini and Grossi-de-Sa, (2002) Toxicon 40(11):1515-1539; Ussuf, et al., (2001) Curr Sci. 80(7):847-853 and Vasconcelos and Oliveira, (2004) Toxicon 44(4):385-403. See also, U.S. Pat. No. 5,266,317 to Tomalski, et al., who disclose genes encoding insect-specific toxins.
[0281] (E) A polynucleotide encoding an enzyme responsible for a hyperaccumulation of a monoterpene, a sesquiterpene, a steroid, hydroxamic acid, a phenylpropanoid derivative or another non-protein molecule with insecticidal activity.
[0282] (F) A polynucleotide encoding an enzyme involved in the modification, including the post-translational modification, of a biologically active molecule; for example, a glycolytic enzyme, a proteolytic enzyme, a lipolytic enzyme, a nuclease, a cyclase, a transaminase, an esterase, a hydrolase, a phosphatase, a kinase, a phosphorylase, a polymerase, an elastase, a chitinase and a glucanase, whether natural or synthetic. See, PCT Application WO 1993/02197 in the name of Scott, et al., which discloses the nucleotide sequence of a callase gene. DNA molecules which contain chitinase-encoding sequences can be obtained, for example, from the ATCC® under Accession Numbers 39637 and 67152. See also, Kramer, et al., (1993) Insect Biochem. Molec. Biol. 23:691, who teach the nucleotide sequence of a cDNA encoding tobacco hookworm chitinase and Kawalleck, et al., (1993) Plant Molec. Biol. 21:673, who provide the nucleotide sequence of the parsley ubi4-2 polyubiquitin gene, and U.S. Pat. Nos. 6,563,020; 7,145,060 and 7,087,810.
[0283] (G) A polynucleotide encoding a molecule that stimulates signal transduction. For example, see the disclosure by Botella, et al., (1994) Plant Molec. Biol. 24:757, of nucleotide sequences for mung bean calmodulin cDNA clones, and Griess, et al., (1994) Plant Physiol. 104:1467, who provide the nucleotide sequence of a maize calmodulin cDNA clone.
[0284] (H) A polynucleotide encoding a hydrophobic moment peptide. See, PCT Application WO 1995/16776 and U.S. Pat. No. 5,580,852 disclosure of peptide derivatives of Tachyplesin which inhibit fungal plant pathogens) and PCT Application WO 1995/18855 and U.S. Pat. No. 5,607,914 (teaches synthetic antimicrobial peptides that confer disease resistance).
[0285] (I) A polynucleotide encoding a membrane permease, a channel former or a channel blocker. For example, see the disclosure by Jaynes, et al., (1993) Plant Sci. 89:43, of heterologous expression of a cecropin-beta lytic peptide analog to render transgenic tobacco plants resistant to Pseudomonas solanacearum.
[0286] (J) A gene encoding a viral-invasive protein or a complex toxin derived therefrom. For example, the accumulation of viral coat proteins in transformed plant cells imparts resistance to viral infection and/or disease development effected by the virus from which the coat protein gene is derived, as well as by related viruses. See, Beachy, et al., (1990) Ann. Rev. Phytopathol. 28:451. Coat protein-mediated resistance has been conferred upon transformed plants against alfalfa mosaic virus, cucumber mosaic virus, tobacco streak virus, potato virus X, potato virus Y, tobacco etch virus, tobacco rattle virus and tobacco mosaic virus. Id.
[0287] (K) A gene encoding an insect-specific antibody or an immunotoxin derived therefrom. Thus, an antibody targeted to a critical metabolic function in the insect gut would inactivate an affected enzyme, killing the insect. Cf. Taylor, et al., Abstract #497, SEVENTH INT'L SYMPOSIUM ON MOLECULAR PLANT-MICROBE INTERACTIONS (Edinburgh, Scotland, 1994) (enzymatic inactivation in transgenic tobacco via production of single-chain antibody fragments).
[0288] (L) A gene encoding a virus-specific antibody. See, for example, Tavladoraki, et al., (1993) Nature 366:469, who show that transgenic plants expressing recombinant antibody genes are protected from virus attack.
[0289] (M) A polynucleotide encoding a developmental-arrestive protein produced in nature by a pathogen or a parasite. Thus, fungal endo alpha-1,4-D-polygalacturonases facilitate fungal colonization and plant nutrient release by solubilizing plant cell wall homo-alpha-1,4-D-galacturonase. See, Lamb, et al., (1992) Bio/Technology 10:1436. The cloning and characterization of a gene which encodes a bean endopolygalacturonase-inhibiting protein is described by Toubart, et al., (1992) Plant J. 2:367.
[0290] (N) A polynucleotide encoding a developmental-arrestive protein produced in nature by a plant. For example, Logemann, et al., (1992) Bio/Technology 10:305, have shown that transgenic plants expressing the barley ribosome-inactivating gene have an increased resistance to fungal disease.
[0291] (O) Genes involved in the Systemic Acquired Resistance (SAR) Response and/or the pathogenesis related genes. Briggs, (1995) Current Biology 5(2), Pieterse and Van Loon, (2004) Curr. Opin. Plant Bio. 7(4):456-64 and Somssich, (2003) Cell 113(7):815-6.
[0292] (P) Antifungal genes (Cornelissen and Melchers, (1993) Pl. Physiol. 101:709-712 and Parijs, et al., (1991) Planta 183:258-264 and Bushnell, et al., (1998) Can. J. of Plant Path. 20(2):137-149. Also see, U.S. patent application Ser. Nos. 09/950,933; 11/619,645; 11/657,710; 11/748,994; 11/774,121 and U.S. Pat. Nos. 6,891,085 and 7,306,946. LysM Receptor-like kinases for the perception of chitin fragments as a first step in plant defense response against fungal pathogens (US 2012/0110696).
[0293] (Q) Detoxification genes, such as for fumonisin, beauvericin, moniliformin and zearalenone and their structurally related derivatives. For example, see, U.S. Pat. Nos. 5,716,820; 5,792,931; 5,798,255; 5,846,812; 6,083,736; 6,538,177; 6,388,171 and 6,812,380.
[0294] (R) A polynucleotide encoding a Cystatin and cysteine proteinase inhibitors. See, U.S. Pat. No. 7,205,453.
[0295] (S) Defensin genes. See, WO 2003/000863 and U.S. Pat. Nos. 6,911,577; 6,855,865; 6,777,592 and 7,238,781.
[0296] (T) Genes conferring resistance to nematodes. See, e.g., PCT Application WO 1996/30517; PCT Application WO 1993/19181, WO 2003/033651 and Urwin, et al., (1998) Planta 204:472-479, Williamson, (1999) Curr Opin Plant Bio. 2(4):327-31; U.S. Pat. Nos. 6,284,948 and 7,301,069 and miR164 genes (WO 2012/058266).
[0297] (U) Genes that confer resistance to Phytophthora Root Rot, such as the Rps 1, Rps 1-a, Rps 1-b, Rps 1-c, Rps 1-d, Rps 1-e, Rps 1-k, Rps 2, Rps 3-a, Rps 3-b, Rps 3-c, Rps 4, Rps 5, Rps 6, Rps 7 and other Rps genes. See, for example, Shoemaker, et al., Phytophthora Root Rot Resistance Gene Mapping in Soybean, Plant Genome IV Conference, San Diego, Calif. (1995).
[0298] (V) Genes that confer resistance to Brown Stem Rot, such as described in U.S. Pat. No. 5,689,035 and incorporated by reference for this purpose.
[0299] (W) Genes that confer resistance to Colletotrichum, such as described in US Patent Application Publication US 2009/0035765 and incorporated by reference for this purpose. This includes the Rcg locus that may be utilized as a single locus conversion.
   2. Transgenes that Confer Resistance to a Herbicide, for Example:
[0300] (A) A polynucleotide encoding resistance to a herbicide that inhibits the growing point or meristem, such as an imidazolinone or a sulfonylurea. Exemplary genes in this category code for mutant ALS and AHAS enzyme as described, for example, by Lee, et al., (1988) EMBO J. 7:1241 and Miki, et al., (1990) Theor. Appl. Genet. 80:449, respectively. See also, U.S. Pat. Nos. 5,605,011; 5,013,659; 5,141,870; 5,767,361; 5,731,180; 5,304,732; 4,761,373; 5,331,107; 5,928,937 and 5,378,824; U.S. patent application Ser. No. 11/683,737 and International Publication WO 1996/33270.
[0301] (B) A polynucleotide encoding a protein for resistance to Glyphosate (resistance imparted by mutant 5-enolpyruvl-3-phosphikimate synthase (EPSP) and aroA genes, respectively) and other phosphono compounds such as glufosinate (phosphinothricin acetyl transferase (PAT) and Streptomyces hygroscopicus phosphinothricin acetyl transferase (bar) genes), and pyridinoxy or phenoxy proprionic acids and cyclohexones (ACCase inhibitor-encoding genes). See, for example, U.S. Pat. No. 4,940,835 to Shah, et al., which discloses the nucleotide sequence of a form of EPSPS which can confer glyphosate resistance. U.S. Pat. No. 5,627,061 to Barry, et al., also describes genes encoding EPSPS enzymes. See also, U.S. Pat. Nos. 6,566,587; 6,338,961; 6,248,876 B1; 6,040,497; 5,804,425; 5,633,435; 5,145,783; 4,971,908; 5,312,910; 5,188,642; 5,094,945, 4,940,835; 5,866,775; 6,225,114 B1; 6,130,366; 5,310,667; 4,535,060; 4,769,061; 5,633,448; 5,510,471; Re. 36,449; RE 37,287 E and 5,491,288 and International Publications EP 1173580; WO 2001/66704; EP 1173581 and EP 1173582, which are incorporated herein by reference for this purpose. Glyphosate resistance is also imparted to plants that express a gene encoding a glyphosate oxido-reductase enzyme as described more fully in U.S. Pat. Nos. 5,776,760 and 5,463,175, which are incorporated herein by reference for this purpose. In addition glyphosate resistance can be imparted to plants by the over expression of genes encoding glyphosate N-acetyltransferase. See, for example, U.S. Pat. Nos. 7,462,481; 7,405,074 and US Patent Application Publication Number US 2008/0234130. A DNA molecule encoding a mutant aroA gene can be obtained under ATCC® Accession Number 39256, and the nucleotide sequence of the mutant gene is disclosed in U.S. Pat. No. 4,769,061 to Comai. EP Application Number 0 333 033 to Kumada, et al., and U.S. Pat. No. 4,975,374 to Goodman, et al., disclose nucleotide sequences of glutamine synthetase genes which confer resistance to herbicides such as L-phosphinothricin. The nucleotide sequence of a phosphinothricin-acetyl-transferase gene is provided in EP Application Numbers 0 242 246 and 0 242 236 to Leemans, et al.; De Greef, et al., (1989) Bio/Technology 7:61, describe the production of transgenic plants that express chimeric bar genes coding for phosphinothricin acetyl transferase activity. See also, U.S. Pat. Nos. 5,969,213; 5,489,520; 5,550,318; 5,874,265; 5,919,675; 5,561,236; 5,648,477; 5,646,024; 6,177,616 B1 and 5,879,903, which are incorporated herein by reference for this purpose. Exemplary genes conferring resistance to phenoxy proprionic acids and cyclohexones, such as sethoxydim and haloxyfop, are the Acc1-S1, Acc1-S2 and Acc1-S3 genes described by Marshall, et al., (1992) Theor. Appl. Genet. 83:435.
[0302] (C) A polynucleotide encoding a protein for resistance to herbicide that inhibits photosynthesis, such as a triazine (psbA and gs+ genes) and a benzonitrile (nitrilase gene). Przibilla, et al., (1991) Plant Cell 3:169, describe the transformation of Chlamydomonas with plasmids encoding mutant psbA genes. Nucleotide sequences for nitrilase genes are disclosed in U.S. Pat. No. 4,810,648 to Stalker and DNA molecules containing these genes are available under ATCC® Accession Numbers 53435, 67441 and 67442. Cloning and expression of DNA coding for a glutathione S-transferase is described by Hayes, et al., (1992) Biochem. J. 285:173.
[0303] (D) A polynucleotide encoding a protein for resistance to Acetohydroxy acid synthase, which has been found to make plants that express this enzyme resistant to multiple types of herbicides, has been introduced into a variety of plants (see, e.g., Hattori, et al., (1995) Mol Gen Genet. 246:419). Other genes that confer resistance to herbicides include: a gene encoding a chimeric protein of rat cytochrome P4507A1 and yeast NADPH-cytochrome P450 oxidoreductase (Shiota, et al., (1994) Plant Physiol 106:17), genes for glutathione reductase and superoxide dismutase (Aono, et al., (1995) Plant Cell Physiol 36:1687) and genes for various phosphotransferases (Datta, et al., (1992) Plant Mol Biol 20:619).
[0304] (E) A polynucleotide encoding resistance to a herbicide targeting Protoporphyrinogen oxidase (protox) which is necessary for the production of chlorophyll. The protox enzyme serves as the target for a variety of herbicidal compounds. These herbicides also inhibit growth of all the different species of plants present, causing their total destruction. The development of plants containing altered protox activity which are resistant to these herbicides are described in U.S. Pat. Nos. 6,288,306 B1; 6,282,837 B1 and 5,767,373 and International Publication WO 2001/12825.
[0305] (F) The aad-1 gene (originally from Sphingobium herbicidovorans) encodes the aryloxyalkanoate dioxygenase (AAD-1) protein. The trait confers tolerance to 2,4-dichlorophenoxyacetic acid and aryloxyphenoxypropionate (commonly referred to as “fop” herbicides such as quizalofop) herbicides. The aad-1 gene, itself, for herbicide tolerance in plants was first disclosed in WO 2005/107437 (see also, US 2009/0093366). The aad-12 gene, derived from Delftia acidovorans, which encodes the aryloxyalkanoate dioxygenase (AAD-12) protein that confers tolerance to 2,4-dichlorophenoxyacetic acid and pyridyloxyacetate herbicides by deactivating several herbicides with an aryloxyalkanoate moiety, including phenoxy auxin (e.g., 2,4-D, MCPA), as well as pyridyloxy auxins (e.g., fluroxypyr, triclopyr).
[0306] (G) A polynucleotide encoding a herbicide resistant dicamba monooxygenase disclosed in US Patent Application Publication 2003/0135879 for imparting dicamba tolerance;
[0307] (H) A polynucleotide molecule encoding bromoxynil nitrilase (Bxn) disclosed in U.S. Pat. No. 4,810,648 for imparting bromoxynil tolerance;
[0308] (I) A polynucleotide molecule encoding phytoene (crtl) described in Misawa, et al., (1993) Plant J. 4:833-840 and in Misawa, et al., (1994) Plant J. 6:481-489 for norflurazon tolerance.
   3. Transgenes that Confer or Contribute to an Altered Grain Characteristic

### Such as:

[0309] (A) Altered fatty acids, for example, by
   [0310] (1) Down-regulation of stearoyl-ACP to increase stearic acid content of the plant. See, Knultzon, et al., (1992) Proc. Natl. Acad. Sci. USA 89:2624 and WO 1999/64579 (Genes to Alter Lipid Profiles in Corn).
   [0311] (2) Elevating oleic acid via FAD-2 gene modification and/or decreasing linolenic acid via FAD-3 gene modification (see, U.S. Pat. Nos. 6,063,947; 6,323,392; 6,372,965 and WO 1993/11245).
   [0312] (3) Altering conjugated linolenic or linoleic acid content, such as in WO 2001/12800.
   [0313] (4) Altering LEC1, AGP, Dek1, Superal1, mi1 ps, various Ipa genes such as Ipa1, Ipa3, hpt or hggt. For example, see, WO 2002/42424, WO 1998/22604, WO 2003/011015, WO 2002/057439, WO 2003/011015, U.S. Pat. Nos. 6,423,886, 6,197,561, 6,825,397 and US Patent Application Publication Numbers US 2003/0079247, US 2003/0204870 and Rivera-Madrid, et al., (1995) Proc. Natl. Acad. Sci. 92:5620-5624.
   [0314] (5) Genes encoding delta-8 desaturase for making long-chain polyunsaturated fatty acids (U.S. Pat. Nos. 8,058,571 and 8,338,152), delta-9 desaturase for lowering saturated fats (U.S. Pat. No. 8,063,269), Primula Δ6-desaturase for improving omega-3 fatty acid profiles.
   [0315] (6) Isolated nucleic acids and proteins associated with lipid and sugar metabolism regulation, in particular, lipid metabolism protein (LMP) used in methods of producing transgenic plants and modulating levels of seed storage compounds including lipids, fatty acids, starches or seed storage proteins and use in methods of modulating the seed size, seed number, seed weights, root length and leaf size of plants (EP 2404499).
   [0316] (7) Altering expression of a High-Level Expression of Sugar-Inducible 2 (HSI2) protein in the plant to increase or decrease expression of HSI2 in the plant. Increasing expression of HSI2 increases oil content while decreasing expression of HSI2 decreases abscisic acid sensitivity and/or increases drought resistance (US Patent Application Publication Number 2012/0066794).
   [0317] (8) Expression of cytochrome b5 (Cb5) alone or with FAD2 to modulate oil content in plant seed, particularly to increase the levels of omega-3 fatty acids and improve the ratio of omega-6 to omega-3 fatty acids (US Patent Application Publication Number 2011/0191904).
   [0318] (9) Nucleic acid molecules encoding wrinkled1-like polypeptides for modulating sugar metabolism (U.S. Pat. No. 8,217,223).
[0319] (B) Altered phosphorus content, for example, by the
   [0320] (1) Introduction of a phytase-encoding gene would enhance breakdown of phytate, adding more free phosphate to the transformed plant. For example, see, Van Hartingsveldt, et al., (1993) Gene 127:87, for a disclosure of the nucleotide sequence of an Aspergillus niger phytase gene.
   [0321] (2) Modulating a gene that reduces phytate content. In maize, this, for example, could be accomplished, by cloning and then re-introducing DNA associated with one or more of the alleles, such as the LPA alleles, identified in maize mutants characterized by low levels of phytic acid, such as in WO 2005/113778 and/or by altering inositol kinase activity as in WO 2002/059324, US Patent Application Publication Number 2003/0009011, WO 2003/027243, US Patent Application Publication Number 2003/0079247, WO 1999/05298, U.S. Pat. Nos. 6,197,561, 6,291,224, 6,391,348, WO 2002/059324, US Patent Application Publication Number 2003/0079247, WO 1998/45448, WO 1999/55882, WO 2001/04147.
[0322] (C) Altered carbohydrates affected, for example, by altering a gene for an enzyme that affects the branching pattern of starch or, a gene altering thioredoxin such as NTR and/or TRX (see, U.S. Pat. No. 6,531,648. which is incorporated by reference for this purpose) and/or a gamma zein knock out or mutant such as cs27 or TUSC27 or en27 (see, U.S. Pat. No. 6,858,778 and US Patent Application Publication Number 2005/0160488, US Patent Application Publication Number 2005/0204418, which are incorporated by reference for this purpose). See, Shiroza, et al., (1988) J. Bacteriol. 170:810 (nucleotide sequence of Streptococcus mutant fructosyltransferase gene), Steinmetz, et al., (1985) Mol. Gen. Genet. 200:220 (nucleotide sequence of Bacillus subtilis levansucrase gene), Pen, et al., (1992) Bio/Technology 10:292 (production of transgenic plants that express Bacillus licheniformis alpha-amylase), Elliot, et al., (1993) Plant Molec. Biol. 21:515 (nucleotide sequences of tomato invertase genes), Søgaard, et al., (1993) J. Biol. Chem. 268:22480 (site-directed mutagenesis of barley alpha-amylase gene) and Fisher, et al., (1993) Plant Physiol. 102:1045 (maize endosperm starch branching enzyme II), WO 1999/10498 (improved digestibility and/or starch extraction through modification of UDP-D-xylose 4-epimerase, Fragile 1 and 2, Ref1, HCHL, C4H), U.S. Pat. No. 6,232,529 (method of producing high oil seed by modification of starch levels (AGP)). The fatty acid modification genes mentioned herein may also be used to affect starch content and/or composition through the interrelationship of the starch and oil pathways.
[0323] (D) Altered antioxidant content or composition, such as alteration of tocopherol or tocotrienols. For example, see, U.S. Pat. No. 6,787,683, US Patent Application Publication Number 2004/0034886 and WO 2000/68393 involving the manipulation of antioxidant levels and WO 2003/082899 through alteration of a homogentisate geranyl geranyl transferase (hggt).
[0324] (E) Altered essential seed amino acids. For example, see, U.S. Pat. No. 6,127,600 (method of increasing accumulation of essential amino acids in seeds), U.S. Pat. No. 6,080,913 (binary methods of increasing accumulation of essential amino acids in seeds), U.S. Pat. No. 5,990,389 (high lysine), WO 1999/40209 (alteration of amino acid compositions in seeds), WO 1999/29882 (methods for altering amino acid content of proteins), U.S. Pat. No. 5,850,016 (alteration of amino acid compositions in seeds), WO 1998/20133 (proteins with enhanced levels of essential amino acids), U.S. Pat. No. 5,885,802 (high methionine), U.S. Pat. No. 5,885,801 (high threonine), U.S. Pat. No. 6,664,445 (plant amino acid biosynthetic enzymes), U.S. Pat. No. 6,459,019 (increased lysine and threonine), U.S. Pat. No. 6,441,274 (plant tryptophan synthase beta subunit), U.S. Pat. No. 6,346,403 (methionine metabolic enzymes), U.S. Pat. No. 5,939,599 (high sulfur), U.S. Pat. No. 5,912,414 (increased methionine), WO 1998/56935 (plant amino acid biosynthetic enzymes), WO 1998/45458 (engineered seed protein having higher percentage of essential amino acids), WO 1998/42831 (increased lysine), U.S. Pat. No. 5,633,436 (increasing sulfur amino acid content), U.S. Pat. No. 5,559,223 (synthetic storage proteins with defined structure containing programmable levels of essential amino acids for improvement of the nutritional value of plants), WO 1996/01905 (increased threonine), WO 1995/15392 (increased lysine), US Patent Application Publication Number 2003/0163838, US Patent Application Publication Number 2003/0150014, US Patent Application Publication Number 2004/0068767, U.S. Pat. No. 6,803,498, WO 2001/79516.
   4. Genes that Control Male-Sterility:

[0325] There are several methods of conferring genetic male sterility available, such as multiple mutant genes at separate locations within the genome that confer male sterility, as disclosed in U.S. Pat. Nos. 4,654,465 and 4,727,219 to Brar, et al., and chromosomal translocations as described by Patterson in U.S. Pat. Nos. 3,861,709 and 3,710,511. In addition to these methods, Albertsen, et al., U.S. Pat. No. 5,432,068, describe a system of nuclear male sterility which includes: identifying a gene which is critical to male fertility; silencing this native gene which is critical to male fertility; removing the native promoter from the essential male fertility gene and replacing it with an inducible promoter; inserting this genetically engineered gene back into the plant; and thus creating a plant that is male sterile because the inducible promoter is not “on” resulting in the male fertility gene not being transcribed. Fertility is restored by inducing or turning “on”, the promoter, which in turn allows the gene that confers male fertility to be transcribed.
[0326] (A) Introduction of a deacetylase gene under the control of a tapetum-specific promoter and with the application of the chemical N—Ac-PPT (WO 2001/29237).
[0327] (B) Introduction of various stamen-specific promoters (WO 1992/13956, WO 1992/13957).
[0328] (C) Introduction of the barnase and the barstar gene (Paul, et al., (1992) Plant Mol. Biol. 19:611-622).
   For additional examples of nuclear male and female sterility systems and genes, see also, U.S. Pat. Nos. 5,859,341; 6,297,426; 5,478,369; 5,824,524; 5,850,014 and 6,265,640, all of which are hereby incorporated by reference.
   5. Genes that Create a Site for Site Specific DNA Integration.
   This includes the introduction of FRT sites that may be used in the FLP/FRT system and/or Lox sites that may be used in the Cre/Loxp system. For example, see, Lyznik, et al., (2003) Plant Cell Rep 21:925-932 and WO 1999/25821, which are hereby incorporated by reference. Other systems that may be used include the Gin recombinase of phage Mu (Maeser, et al., (1991) Vicki Chandler, The Maize Handbook ch. 118 (Springer-Verlag 1994), the Pin recombinase of E. coli (Enomoto, et al., 1983) and the R/RS system of the pSRi plasmid (Araki, et al., 1992).
   6. Genes that Affect Abiotic Stress Resistance
   Including but not limited to flowering, ear and seed development, enhancement of nitrogen utilization efficiency, altered nitrogen responsiveness, drought resistance or tolerance, cold resistance or tolerance and salt resistance or tolerance and increased yield under stress.
[0329] (A) For example, see: WO 2000/73475 where water use efficiency is altered through alteration of malate; U.S. Pat. Nos. 5,892,009, 5,965,705, 5,929,305, 5,891,859, 6,417,428, 6,664,446, 6,706,866, 6,717,034, 6,801,104, WO 2000/060089, WO 2001/026459, WO 2001/035725, WO 2001/034726, WO 2001/035727, WO 2001/036444, WO 2001/036597, WO 2001/036598, WO 2002/015675, WO 2002/017430, WO 2002/077185, WO 2002/079403, WO 2003/013227, WO 2003/013228, WO 2003/014327, WO 2004/031349, WO 2004/076638, WO 199809521.
[0330] (B) WO 199938977 describing genes, including CBF genes and transcription factors effective in mitigating the negative effects of freezing, high salinity and drought on plants, as well as conferring other positive effects on plant phenotype.
[0331] (C) US Patent Application Publication Number 2004/0148654 and WO 2001/36596 where abscisic acid is altered in plants resulting in improved plant phenotype such as increased yield and/or increased tolerance to abiotic stress.
[0332] (D) WO 2000/006341, WO 2004/090143, U.S. Pat. Nos. 7,531,723 and 6,992,237 where cytokinin expression is modified resulting in plants with increased stress tolerance, such as drought tolerance, and/or increased yield. Also see, WO 2002/02776, WO 2003/052063, JP 2002/281975, U.S. Pat. No. 6,084,153, WO 2001/64898, U.S. Pat. Nos. 6,177,275 and 6,107,547 (enhancement of nitrogen utilization and altered nitrogen responsiveness).
[0333] (E) For ethylene alteration, see, US Patent Application Publication Number 2004/0128719, US Patent Application Publication Number 2003/0166197 and WO 2000/32761.
[0334] (F) For plant transcription factors or transcriptional regulators of abiotic stress, see, e.g., US Patent Application Publication Number 2004/0098764 or US Patent Application Publication Number 2004/0078852.
[0335] (G) Genes that increase expression of vacuolar pyrophosphatase such as AVP1 (U.S. Pat. No. 8,058,515) for increased yield; nucleic acid encoding a HSFA4 or a HSFA5 (Heat Shock Factor of the class A4 or A5) polypeptides, an oligopeptide transporter protein (OPT4-like) polypeptide; a plastochron2-like (PLA2-like) polypeptide or a Wuschel related homeobox 1-like (WOX1-like) polypeptide (U. Patent Application Publication Number US 2011/0283420).
[0336] (H) Down regulation of polynucleotides encoding poly (ADP-ribose) polymerase (PARP) proteins to modulate programmed cell death (U.S. Pat. No. 8,058,510) for increased vigor.
[0337] (I) Polynucleotide encoding DTP21 polypeptides for conferring drought resistance (US Patent Application Publication Number US 2011/0277181).
[0338] (J) Nucleotide sequences encoding ACC Synthase 3 (ACS3) proteins for modulating development, modulating response to stress, and modulating stress tolerance (US Patent Application Publication Number US 2010/0287669).
[0339] (K) Polynucleotides that encode proteins that confer a drought tolerance phenotype (DTP) for conferring drought resistance (WO 2012/058528).
[0340] (L) Tocopherol cyclase (TC) genes for conferring drought and salt tolerance (US Patent Application Publication Number 2012/0272352).
[0341] (M) CAAX amino terminal family proteins for stress tolerance (U.S. Pat. No. 8,338,661).
[0342] (N) Mutations in the SAL1 encoding gene have increased stress tolerance, including increased drought resistant (US Patent Application Publication Number 2010/0257633).
[0343] (O) Expression of a nucleic acid sequence encoding a polypeptide selected from the group consisting of: GRF polypeptide, RAA1-like polypeptide, SYR polypeptide, ARKL polypeptide, and YTP polypeptide increasing yield-related traits (US Patent Application Publication Number 2011/0061133).
[0344] (P) Modulating expression in a plant of a nucleic acid encoding a Class Ill Trehalose Phosphate Phosphatase (TPP) polypeptide for enhancing yield-related traits in plants, particularly increasing seed yield (US Patent Application Publication Number 2010/0024067).
   Other genes and transcription factors that affect plant growth and agronomic traits such as yield, flowering, plant growth and/or plant structure, can be introduced or introgressed into plants, see e.g., WO 1997/49811 (LHY), WO 1998/56918 (ESD4), WO 1997/10339 and U.S. Pat. No. 6,573,430 (TFL), U.S. Pat. No. 6,713,663 (FT), WO 1996/14414 (CON), WO 1996/38560, WO 2001/21822 (VRN1), WO 2000/44918 (VRN2), WO 1999/49064 (GI), WO 2000/46358 (FR1), WO 1997/29123, U.S. Pat. Nos. 6,794,560, 6,307,126 (GAI), WO 1999/09174 (D8 and Rht) and WO 2004/076638 and WO 2004/031349 (transcription factors).
   7. Genes that Confer Increased Yield
[0345] (A) A transgenic crop plant transformed by a 1-AminoCyclopropane-1-Carboxylate Deaminase-like Polypeptide (ACCDP) coding nucleic acid, wherein expression of the nucleic acid sequence in the crop plant results in the plant's increased root growth, and/or increased yield, and/or increased tolerance to environmental stress as compared to a wild type variety of the plant (U.S. Pat. No. 8,097,769).
[0346] (B) Over-expression of maize zinc finger protein gene (Zm-ZFP1) using a seed preferred promoter has been shown to enhance plant growth, increase kernel number and total kernel weight per plant (US Patent Application Publication Number 2012/0079623).
[0347] (C) Constitutive over-expression of maize lateral organ boundaries (LOB) domain protein (Zm-LOBDP1) has been shown to increase kernel number and total kernel weight per plant (US Patent Application Publication Number 2012/0079622).
[0348] (D) Enhancing yield-related traits in plants by modulating expression in a plant of a nucleic acid encoding a VIM1 (Variant in Methylation 1)-like polypeptide or a VTC2-like (GDP-L-galactose phosphorylase) polypeptide or a DUF1685 polypeptide or an ARF6-like (Auxin Responsive Factor) polypeptide (WO 2012/038893).
[0349] (E) Modulating expression in a plant of a nucleic acid encoding a Ste20-like polypeptide or a homologue thereof gives plants having increased yield relative to control plants (EP 2431472).
[0350] (F) Genes encoding nucleoside diphosphatase kinase (NDK) polypeptides and homologs thereof for modifying the plant's root architecture (US Patent Application Publication Number 2009/0064373).
   8. Genes that Confer Plant Digestibility.
[0351] (A) Altering the level of xylan present in the cell wall of a plant by modulating expression of xylan synthase (U.S. Pat. No. 8,173,866).
   In some embodiment the stacked trait may be a trait or event that has received regulatory approval including but not limited to the events in Table 5A-5F.

TABLE 5A
Medicago sativa Alfalfa

| Event | Company | Description |
|---|---|---|
| J101, | Monsanto | Glyphosate herbicide tolerant alfalfa (lucerne) |
| J163 | Company and | produced by inserting a gene encoding the |
| | Forage | enzyme 5-enolypyruvylshikimate-3-phosphate |
| | Genetics | synthase (EPSPS) from the CP4 strain of |
| | International | Agrobacterium tumefaciens. |

TABLE 5B
Helianthus annuus Sunflower

| Event | Company | Description |
|---|---|---|
| X81359 | BASF Inc. | Tolerance to imidazolinone herbicides by |
| | | selection of a naturally occurring mutant. |

TABLE 5C
Oryza sativa Rice

| Event | Company | Description |
|---|---|---|
| CL121, CL141, CFX51 | BASF Inc. | Tolerance to the imidazolinone herbicide, |
| | | imazethapyr, induced by chemical mutagenesis of |
| | | the acetolactate synthase (ALS) enzyme using |
| | | ethyl methanesulfonate (EMS). |
| IMINTA-1, IMINTA-4 | BASF Inc. | Tolerance to imidazolinone herbicides induced by |
| | | chemical mutagenesis of the acetolactate synthase |
| | | (ALS) enzyme using sodium azide. |
| LLRICE06, LLRICE62 | Aventis CropScience | Glufosinate ammonium herbicide tolerant rice |
| | | produced by inserting a modified phosphinothricin |
| | | acetyltransferase (PAT) encoding gene from the |
| | | soil bacterium Streptomyces hygroscopicus) |
| LLRICE601 | Bayer CropScience | Glufosinate ammonium herbicide tolerant rice |
| | (Aventis | produced by inserting a modified phosphinothricin |
| | CropScience(AgrEvo)) | acetyltransferase (PAT) encoding gene from the |
| | | soil bacterium Streptomyces hygroscopicus). |
| PWC16 | BASF Inc. | Tolerance to the imidazolinone herbicide, |
| | | imazethapyr, induced by chemical mutagenesis of |
| | | the acetolactate synthase (ALS) enzyme using |
| | | ethyl methanesulfonate (EMS). |

TABLE 5C
Triticum aestivum Wheat

| Event | Company | Description |
|---|---|---|
| AP205CL | BASF Inc. | Selection for a mutagenized version of the enzyme |
| | | acetohydroxyacid synthase (AHAS), also known as |
| | | acetolactate synthase (ALS) or acetolactate |
| | | pyruvate-lyase. |
| AP602CL | BASF Inc. | Selection for a mutagenized version of the enzyme |
| | | acetohydroxyacid synthase (AHAS), also known as |
| | | acetolactate synthase (ALS) or acetolactate |
| | | pyruvate-lyase. |
| BW255-2, BW238-3 | BASF Inc. | Selection for a mutagenized version of the enzyme |
| | | acetohydroxyacid synthase (AHAS), also known as |
| | | acetolactate synthase (ALS) or acetolactate |
| | | pyruvate-lyase. |
| BW7 | BASF Inc. | Tolerance to imidazolinone herbicides induced by |
| | | chemical mutagenesis of the acetohydroxyacid |
| | | synthase (AHAS) gene using sodium azide. |
| MON71800 | Monsanto Company | Glyphosate tolerant wheat variety produced by |
| | | inserting a modified 5-enolpyruvylshikimate-3- |
| | | phosphate synthase (EPSPS) encoding gene from |
| | | the soil bacterium Agrobacterium tumefaciens, |
| | | strain CP4. |
| SWP965001 | Cyanamid Crop | Selection for a mutagenized version of the enzyme |
| | Protection | acetohydroxyacid synthase (AHAS), also known as |
| | | acetolactate synthase (ALS) or acetolactate |
| | | pyruvate-lyase. |
| Teal 11A | BASF Inc. | Selection for a mutagenized version of the enzyme |
| | | acetohydroxyacid synthase (AHAS), also known as |
| | | acetolactate synthase (ALS) or acetolactate |
| | | pyruvate-lyase. |

TABLE 5E
Glycine max L. Soybean

| Event | Company | Description |
|---|---|---|
| A2704-12, A2704-21, | Bayer CropScience | Glufosinate ammonium herbicide tolerant soybean |
| A5547-35 | (Aventis CropScience | produced by inserting a modified phosphinothricin |
| | (AgrEvo)) | acetyltransferase (PAT) encoding gene from the |
| | | soil bacterium Streptomyces viridochromogenes. |
| A5547-127 | Bayer CropScience | Glufosinate ammonium herbicide tolerant soybean |
| | (Aventis CropScience | produced by inserting a modified phosphinothricin |
| | (AgrEvo)) | acetyltransferase (PAT) encoding gene from the |
| | | soil bacterium Streptomyces viridochromogenes. |
| BPS-CV127-9 | BASF Inc. | The introduced csr1-2 gene from Arabidopsis |
| | | thaliana encodes an acetohydroxyacid synthase |
| | | protein that confers tolerance to imidazolinone |
| | | herbicides due to a point mutation that results in a |
| | | single amino acid substitution in which the serine |
| | | residue at position 653 is replaced by asparagine |
| | | (S653N). |
| DP-305423 | Pioneer Hi-Bred | High oleic acid soybean produced by inserting |
| | International Inc. | additional copies of a portion of the omega-6 |
| | | desaturase encoding gene, gm-fad2-1 resulting in |
| | | silencing of the endogenous omega-6 desaturase |
| | | gene (FAD2-1). |
| DP356043 | Pioneer Hi-Bred | Soybean event with two herbicide tolerance genes: |
| | International Inc. | glyphosate N-acetlytransferase, which detoxifies |
| | | glyphosate, and a modified acetolactate synthase |
| | | (ALS) gene which is tolerant to ALS-inhibiting |
| | | herbicides. |
| G94-1, G94-19, G168 | DuPont Canada | High oleic acid soybean produced by inserting a |
| | Agricultural Products | second copy of the fatty acid desaturase |
| | | (GmFad2-1) encoding gene from soybean, which |
| | | resulted in “silencing” of the endogenous host |
| | | gene. |
| GTS 40-3-2 | Monsanto Company | Glyphosate tolerant soybean variety produced by |
| | | inserting a modified 5-enolpyruvylshikimate-3- |
| | | phosphate synthase (EPSPS) encoding gene from |
| | | the soil bacterium Agrobacterium tumefaciens. |
| GU262 | Bayer CropScience | Glufosinate ammonium herbicide tolerant soybean |
| | (Aventis | produced by inserting a modified phosphinothricin |
| | CropScience(AgrEvo)) | acetyltransferase (PAT) encoding gene from the |
| | | soil bacterium Streptomyces viridochromogenes. |
| MON87701 | Monsanto Company | Resistance to Lepidopteran pests of soybean |
| | | including velvetbean caterpillar (Anticarsia |
| | | gemmatalis) and soybean looper (Pseudoplusia |
| | | includens). |
| MON87701 x | Monsanto Company | Glyphosate herbicide tolerance through expression |
| MON89788 | | of the EPSPS encoding gene from A. tumefaciens |
| | | strain CP4, and resistance to Lepidopteran pests |
| | | of soybean including velvetbean caterpillar |
| | | (Anticarsia gemmatalis) and soybean looper |
| | | (Pseudoplusia includens) via expression of the |
| | | Cry1Ac encoding gene from B. thuringiensis. |
| MON89788 | Monsanto Company | Glyphosate-tolerant soybean produced by inserting |
| | | a modified 5-enolpyruvylshikimate-3-phosphate |
| | | synthase (EPSPS) encoding aroA (epsps) gene |
| | | from Agrobacterium tumefaciens CP4. |
| OT96-15 | Agriculture & Agri-Food | Low linolenic acid soybean produced through |
| | Canada | traditional cross-breeding to incorporate the novel |
| | | trait from a naturally occurring fan1 gene mutant |
| | | that was selected for low linolenic acid. |
| W62, W98 | Bayer CropScience | Glufosinate ammonium herbicide tolerant soybean |
| | (Aventis | produced by inserting a modified phosphinothricin |
| | CropScience(AgrEvo)) | acetyltransferase (PAT) encoding gene from the |
| | | soil bacterium Streptomyces hygroscopicus. |

TABLE 5F
Zea mays L. Maize

| Event | Company | Description |
|---|---|---|
| 176 | Syngenta Seeds, Inc. | Insect-resistant maize produced by inserting the |
| | | Cry1Ab gene from Bacillus thuringiensis subsp. |
| | | kurstaki. The genetic modification affords |
| | | resistance to attack by the European corn borer |
| | | (ECB). |
| 3751IR | Pioneer Hi-Bred | Selection of somaclonal variants by culture of |
| | International Inc. | embryos on imidazolinone containing media. |
| 676, 678, 680 | Pioneer Hi-Bred | Male-sterile and glufosinate ammonium herbicide |
| | International Inc. | tolerant maize produced by inserting genes |
| | | encoding DNA adenine methylase and |
| | | phosphinothricin acetyltransferase (PAT) from |
| | | Escherichia coli and Streptomyces |
| | | viridochromogenes, respectively. |
| B16 (DLL25) | Dekalb Genetics | Glufosinate ammonium herbicide tolerant maize |
| | Corporation | produced by inserting the gene encoding |
| | | phosphinothricin acetyltransferase (PAT) from |
| | | Streptomyces hygroscopicus. |
| BT11 (X4334CBR, | Syngenta Seeds, Inc. | Insect-resistant and herbicide tolerant maize |
| X4734CBR) | | produced by inserting the Cry1Ab gene from |
| | | Bacillus thuringiensis subsp. kurstaki, and the |
| | | phosphinothricin N-acetyltransferase (PAT) |
| | | encoding gene from S. viridochromogenes. |
| BT11 x GA21 | Syngenta Seeds, Inc. | Stacked insect resistant and herbicide tolerant |
| | | maize produced by conventional cross breeding of |
| | | parental lines BT11 (OECD unique identifier: SYN- |
| | | BTO11-1) and GA21 (OECD unique identifier: |
| | | MON-OOO21-9). |
| BT11 x MIR162 x | Syngenta Seeds, Inc. | Resistance to Coleopteran pests, particularly corn |
| MIR604 x GA21 | | rootworm pests (Diabrotica spp.) and several |
| | | Lepidopteran pests of corn, including European |
| | | corn borer (ECB, Ostrinia nubilalis), corn earworm |
| | | (CEW, Helicoverpa zea), fall army worm (FAW, |
| | | Spodoptera frugiperda), and black cutworm (BCW, |
| | | Agrotis ipsilon); tolerance to glyphosate and |
| | | glufosinate-ammonium containing herbicides. |
| BT11 x MIR162 | Syngenta Seeds, Inc. | Stacked insect resistant and herbicide tolerant |
| | | maize produced by conventional cross breeding of |
| | | parental lines BT11 (OECD unique identifier: SYN- |
| | | BTO11-1) and MIR162 (OECD unique identifier: |
| | | SYN-IR162-4). Resistance to the European Corn |
| | | Borer and tolerance to the herbicide glufosinate |
| | | ammonium (Liberty) is derived from BT11, which |
| | | contains the Cry1Ab gene from Bacillus |
| | | thuringiensis subsp. kurstaki, and the |
| | | phosphinothricin N-acetyltransferase (PAT) |
| | | encoding gene from S. viridochromogenes. |
| | | Resistance to other Lepidopteran pests, including |
| | | H. zea, S. frugiperda, A. ipsilon, and S. albicosta, |
| | | is derived from MIR162, which contains the vip3Aa |
| | | gene from Bacillus thuringiensis strain AB88. |
| BT11 x MIR162 x | Syngenta Seeds, Inc. | Bacillus thuringiensis Cry1Ab delta-endotoxin |
| MIR604 | | protein and the genetic material necessary for its |
| | | production (via elements of vector pZO1502) in |
| | | Event Bt11 corn (OECD Unique Identifier: SYN- |
| | | BTO11-1) x Bacillus thuringiensis Vip3Aa20 |
| | | insecticidal protein and the genetic material |
| | | necessary for its production (via elements of vector |
| | | pNOV1300) in Event MIR162 maize (OECD |
| | | Unique Identifier: SYN-IR162-4) x modified Cry3A |
| | | protein and the genetic material necessary for its |
| | | production (via elements of vector pZM26) in Event |
| | | MIR604 corn (OECD Unique Identifier: SYN- |
| | | IR6O4-5). |
| CBH-351 | Aventis CropScience | Insect-resistant and glufosinate ammonium |
| | | herbicide tolerant maize developed by inserting |
| | | genes encoding Cry9C protein from Bacillus |
| | | thuringiensis subsp tolworthi and phosphinothricin |
| | | acetyltransferase (PAT) from Streptomyces |
| | | hygroscopicus. |
| DAS-06275-8 | DOW AgroSciences LLC | Lepidopteran insect resistant and glufosinate |
| | | ammonium herbicide-tolerant maize variety |
| | | produced by inserting the Cry1F gene from |
| | | Bacillus thuringiensis var aizawai and the |
| | | phosphinothricin acetyltransferase (PAT) from |
| | | Streptomyces hygroscopicus. |
| BT11 x MIR604 | Syngenta Seeds, Inc. | Stacked insect resistant and herbicide tolerant |
| | | maize produced by conventional cross breeding of |
| | | parental lines BT11 (OECD unique identifier: SYN- |
| | | BTO11-1) and MIR604 (OECD unique identifier: |
| | | SYN-IR6O5-5). Resistance to the European Corn |
| | | Borer and tolerance to the herbicide glufosinate |
| | | ammonium (Liberty) is derived from BT11, which |
| | | contains the Cry1Ab gene from Bacillus |
| | | thuringiensis subsp. kurstaki, and the |
| | | phosphinothricin N-acetyltransferase (PAT) |
| | | encoding gene from S. viridochromogenes. Corn |
| | | rootworm-resistance is derived from MIR604 which |
| | | contains the mCry3A gene from Bacillus |
| | | thuringiensis. |
| BT11 x MIR604 x GA21 | Syngenta Seeds, Inc. | Stacked insect resistant and herbicide tolerant |
| | | maize produced by conventional cross breeding of |
| | | parental lines BT11 (OECD unique identifier: SYN- |
| | | BTO11-1), MIR604 (OECD unique identifier: SYN- |
| | | IR6O5-5) and GA21 (OECD unique identifier: |
| | | MON-OOO21-9). Resistance to the European |
| | | Corn Borer and tolerance to the herbicide |
| | | glufosinate ammonium (Liberty) is derived from |
| | | BT11, which contains the Cry1Ab gene from |
| | | Bacillus thuringiensis subsp. kurstaki, and the |
| | | phosphinothricin N-acetyltransferase (PAT) |
| | | encoding gene from S. viridochromogenes. Corn |
| | | rootworm-resistance is derived from MIR604 which |
| | | contains the mCry3A gene from Bacillus |
| | | thuringiensis. Tolerance to glyphosate herbicide is |
| | | derived from GA21 which contains a a modified |
| | | EPSPS gene from maize. |
| DAS-59122-7 | DOW AgroSciences LLC | Corn rootworm-resistant maize produced by |
| | and Pioneer Hi-Bred | inserting the Cry34Ab1 and Cry35Ab1 genes from |
| | International Inc. | Bacillus thuringiensis strain PS149B1. The PAT |
| | | encoding gene from Streptomyces |
| | | viridochromogenes was introduced as a selectable |
| | | marker. |
| DAS-59122-7 x TC1507 | DOW AgroSciences LLC | Stacked insect resistant and herbicide tolerant |
| x NK603 | and Pioneer Hi-Bred | maize produced by conventional cross breeding of |
| | International Inc. | parental lines DAS-59122-7 (OECD unique |
| | | identifier: DAS-59122-7) and TC1507 (OECD |
| | | unique identifier: DAS-O15O7-1) with NK603 |
| | | (OECD unique identifier: MON-OO6O3-6). Corn |
| | | rootworm-resistance is derived from DAS-59122-7 |
| | | which contains the Cry34Ab1 and Cry35Ab1 genes |
| | | from Bacillus thuringiensis strain PS149B1. |
| | | Lepidopteran resistance and tolerance to |
| | | glufosinate ammonium herbicide is derived from |
| | | TC1507. Tolerance to glyphosate herbicide is |
| | | derived from NK603. |
| DBT418 | Dekalb Genetics | Insect-resistant and glufosinate ammonium |
| | Corporation | herbicide tolerant maize developed by inserting |
| | | genes encoding Cry1AC protein from Bacillus |
| | | thuringiensis subsp kurstaki and phosphinothricin |
| | | acetyltransferase (PAT) from Streptomyces |
| | | hygroscopicus |
| MIR604 x GA21 | Syngenta Seeds, Inc. | Stacked insect resistant and herbicide tolerant |
| | | maize produced by conventional cross breeding of |
| | | parental lines MIR604 (OECD unique identifier: |
| | | SYN-IR6O5-5) and GA21 (OECD unique identifier: |
| | | MON-OOO21-9). Corn rootworm-resistance is |
| | | derived from MIR604 which contains the mCry3A |
| | | gene from Bacillus thuringiensis. Tolerance to |
| | | glyphosate herbicide is derived from GA21. |
| MON80100 | Monsanto Company | Insect-resistant maize produced by inserting the |
| | | Cry1Ab gene from Bacillus thuringiensis subsp. |
| | | kurstaki. The genetic modification affords |
| | | resistance to attack by the European corn borer |
| | | (ECB). |
| MON802 | Monsanto Company | Insect-resistant and glyphosate herbicide tolerant |
| | | maize produced by inserting the genes encoding |
| | | the Cry1Ab protein from Bacillus thuringiensis and |
| | | the 5-enolpyruvylshikimate-3-phosphate synthase |
| | | (EPSPS) from A. tumefaciens strain CP4. |
| MON809 | Pioneer Hi-Bred | Resistance to European corn borer (Ostrinia |
| | International Inc. | nubilalis) by introduction of a synthetic Cry1Ab |
| | | gene. Glyphosate resistance via introduction of the |
| | | bacterial version of a plant enzyme, 5-enolpyruvyl |
| | | shikimate-3-phosphate synthase (EPSPS). |
| MON810 | Monsanto Company | Insect-resistant maize produced by inserting a |
| | | truncated form of the Cry1Ab gene from Bacillus |
| | | thuringiensis subsp. kurstaki HD-1. The genetic |
| | | modification affords resistance to attack by the |
| | | European corn borer (ECB). |
| MON810 xLY038 | Monsanto Company | Stacked insect resistant and enhanced lysine |
| | | content maize derived from conventional cross- |
| | | breeding of the parental lines MON810 (OECD |
| | | identifier: MON-OO81O-6) and LY038 (OECD |
| | | identifier: REN-OOO38-3). |
| MON810 x MON88017 | Monsanto Company | Stacked insect resistant and glyphosate tolerant |
| | | maize derived from conventional cross-breeding of |
| | | the parental lines MON810 (OECD identifier: |
| | | MON-OO81O-6) and MON88017 (OECD |
| | | identifier: MON-88O17-3). European corn borer |
| | | (ECB) resistance is derived from a truncated form |
| | | of the Cry1Ab gene from Bacillus thuringiensis |
| | | subsp. kurstaki HD-1 present in MON810. Corn |
| | | rootworm resistance is derived from the Cry3Bb1 |
| | | gene from Bacillus thuringiensis subspecies |
| | | kumamotoensis strain EG4691 present in |
| | | MON88017. Glyphosate tolerance is derived from |
| | | a 5-enolpyruvylshikimate-3-phosphate synthase |
| | | (EPSPS) encoding gene from Agrobacterium |
| | | tumefaciens strain CP4 present in MON88017. |
| MON832 | Monsanto Company | Introduction, by particle bombardment, of |
| | | glyphosate oxidase (GOX) and a modified 5- |
| | | enolpyruvyl shikimate-3-phosphate synthase |
| | | (EPSPS), an enzyme involved in the shikimate |
| | | biochemical pathway for the production of the |
| | | aromatic amino acids. |
| MON863 | Monsanto Company | Corn rootworm resistant maize produced by |
| | | inserting the Cry3Bb1 gene from Bacillus |
| | | thuringiensis subsp. kumamotoensis. |
| MON863 x MON810 | Monsanto Company | Stacked insect resistant corn hybrid derived from |
| | | conventional cross-breeding of the parental lines |
| | | MON863 (OECD identifier: MON-OO863-5) and |
| | | MON810 (OECD identifier: MON-OO81O-6) |
| MON863 x MON810 x | Monsanto Company | Stacked insect resistant and herbicide tolerant |
| NK603 | | corn hybrid derived from conventional cross- |
| | | breeding of the stacked hybrid MON-OO863-5 x |
| | | MON-OO81O-6 and NK603 (OECD |
| | | identifier: MON-OO6O3-6). |
| MON863 x NK603 | Monsanto Company | Stacked insect resistant and herbicide tolerant |
| | | corn hybrid derived from conventional cross- |
| | | breeding of the parental lines MON863 (OECD |
| | | identifier: MON-OO863-5) and NK603 (OECD |
| | | identifier: MON-OO6O3-6). |
| MON87460 | Monsanto Company | MON 87460 was developed to provide reduced |
| | | yield loss under water-limited conditions compared |
| | | to conventional maize. Efficacy in MON 87460 is |
| | | derived by expression of the inserted Bacillus |
| | | subtilis cold shock protein B (CspB). |
| MON88017 | Monsanto Company | Corn rootworm-resistant maize produced by |
| | | inserting the Cry3Bb1 gene from Bacillus |
| | | thuringiensis subspecies kumamotoensis strain |
| | | EG4691. Glyphosate tolerance derived by inserting |
| | | a 5-enolpyruvylshikimate-3-phosphate synthase |
| | | (EPSPS) encoding gene from Agrobacterium |
| | | tumefaciens strain CP4. |
| MON89034 | Monsanto Company | Maize event expressing two different insecticidal |
| | | proteins from Bacillus thuringiensis providing |
| | | resistance to number of Lepidopteran pests. |
| MON89034 x | Monsanto Company | Stacked insect resistant and glyphosate tolerant |
| MON88017 | | maize derived from conventional cross-breeding of |
| | | the parental lines MON89034 (OECD identifier: |
| | | MON-89O34-3) and MON88017 (OECD |
| | | identifier: MON-88O17-3). Resistance to |
| | | Lepidopteran insects is derived from two Cry |
| | | genes present in MON89043. Corn rootworm |
| | | resistance is derived from a single Cry genes and |
| | | glyphosate tolerance is derived from the 5- |
| | | enolpyruvylshikimate-3-phosphate synthase |
| | | (EPSPS) encoding gene from Agrobacterium |
| | | tumefaciens present in MON88017. |
| MON89034 x NK603 | Monsanto Company | Stacked insect resistant and herbicide tolerant |
| | | maize produced by conventional cross breeding of |
| | | parental lines MON89034 (OECD identifier: MON- |
| | | 89O34-3) with NK603 (OECD unique identifier: |
| | | MON-OO6O3-6). Resistance to Lepidopteran |
| | | insects is derived from two Cry genes present in |
| | | MON89043. Tolerance to glyphosate herbicide is |
| | | derived from NK603. |
| NK603 x | Monsanto Company | Stacked insect resistant and herbicide tolerant corn |
| MON810 | | hybrid derived from conventional cross-breeding of the |
| | | parental lines NK603 (OECD identifier: MON-OO6O3-6) |
| | | and MON810 (OECD identifier: MON-OO81O-6). |
| MON89034 x | Monsanto Company and | Stacked insect resistant and herbicide tolerant maize |
| TC1507 x | Mycogen Seeds c/o Dow | produced by conventional cross breeding of parental |
| MON88017 x | AgroSciences LLC | lines: MON89034, TC1507, MON88017, and DAS-59122. |
| DAS-59122-7 | | Resistance to the above-ground and below-ground insect |
| | | pests and tolerance to glyphosate and glufosinate- |
| | | ammonium containing herbicides. |
| MS3 | Bayer CropScience | Male sterility caused by expression of the barnase |
| | (Aventis | ribonuclease gene from Bacillus amyloliquefaciens; PPT |
| | CropScience(AgrEvo)) | resistance was via PPT-acetyltransferase (PAT). |
| MS6 | Bayer CropScience | Male sterility caused by expression of the barnase |
| | (Aventis | ribonuclease gene from Bacillus amyloliquefaciens; PPT |
| | CropScience(AgrEvo)) | resistance was via PPT-acetyltransferase (PAT). |
| NK603 | Monsanto Company | Introduction, by particle bombardment, of a modified 5- |
| | | enolpyruvyl shikimate-3-phosphate synthase (EPSPS), |
| | | an enzyme involved in the shikimate biochemical |
| | | pathway for the production of the aromatic amino acids. |
| NK603 x T25 | Monsanto Company | Stacked glufosinate ammonium and glyphosate herbicide |
| | | tolerant maize hybrid derived from conventional cross- |
| | | breeding of the parental lines NK603 (OECD identifier: |
| | | MON-OO6O3-6) and T25 (OECD identifier: ACS-ZM003- |
| | | 2). |
| T25 x MON810 | Bayer CropScience | Stacked insect resistant and herbicide tolerant corn |
| | (Aventis | hybrid derived from conventional cross-breeding of the |
| | CropScience(AgrEvo)) | parental lines T25 (OECD identifier: ACS-ZMOO3-2) and |
| | | MON810 (OECD identifier: MON-OO81O-6). |
| TC1507 | Mycogen (c/o Dow | Insect-resistant and glufosinate ammonium herbicide |
| | AgroSciences); Pioneer | tolerant maize produced by inserting the Cry1F gene from |
| | (c/o DuPont) | Bacillus thuringiensis var. aizawai and the |
| | | phosphinothricin N-acetyltransferase encoding gene from |
| | | Streptomyces viridochromogenes. |
| TC1507 x | DOW AgroSciences LLC | Stacked insect resistant and herbicide tolerant corn |
| NK603 | | hybrid derived from conventional cross-breeding of the |
| | | parental lines 1507 (OECD identifier: DAS-O15O7-1) and |
| | | NK603 (OECD identifier: MON-OO6O3-6). |
| TC1507 x DAS- | DOW AgroSciences LLC | Stacked insect resistant and herbicide tolerant maize |
| 59122-7 | and Pioneer Hi-Bred | produced by conventional cross breeding of parental lines |
| | International Inc. | TC1507 (OECD unique identifier: DAS-O15O7-1) with |
| | | DAS-59122-7 (OECD unique identifier: DAS-59122-7). |
| | | Resistance to Lepidopteran insects is derived from |
| | | TC1507 due the presence of the Cry1F gene from |
| | | Bacillus thuringiensis var. aizawai. Corn rootworm- |
| | | resistance is derived from DAS-59122-7 which contains |
| | | the Cry34Ab1 and Cry35Ab1 genes from Bacillus |
| | | thuringiensis strain PS149B1. Tolerance to glufosinate |
| | | ammonium herbicide is derived from TC1507 from the |
| | | phosphinothricin N-acetyltransferase encoding gene from |
| | | Streptomyces viridochromogenes. |

Other events with regulatory approval are well known to one skilled in the art and can be found at the Center for Environmental Risk Assessment (cera-gmc.org/?action=gm_crop_database, which can be accessed using the www prefix) and at the International Service for the Acquisition of Agri-Biotech Applications (isaaa.org/gmapprovaldatabase/default.asp, which can be accessed using the www prefix).

### Gene Silencing

[0352] In some embodiments the stacked trait may be in the form of silencing of one or more polynucleotides of interest resulting in suppression of one or more target pest polypeptides.
In some embodiments the silencing is achieved through the use of a suppression DNA construct.
In some embodiments one or more polynucleotide encoding the polypeptides of the PtIP-83 polypeptide or fragments or variants thereof may be stacked with one or more polynucleotides encoding one or more polypeptides having insecticidal activity or agronomic traits as set forth supra and optionally may further include one or more polynucleotides providing for gene silencing of one or more target polynucleotides as discussed infra. “Suppression DNA construct” is a recombinant DNA construct which when transformed or stably integrated into the genome of the plant, results in “silencing” of a target gene in the plant. The target gene may be endogenous or transgenic to the plant. “Silencing,” as used herein with respect to the target gene, refers generally to the suppression of levels of mRNA or protein/enzyme expressed by the target gene, and/or the level of the enzyme activity or protein functionality. The term “suppression” includes lower, reduce, decline, decrease, inhibit, eliminate and prevent. “Silencing” or “gene silencing” does not specify mechanism and is inclusive, and not limited to, anti-sense, cosuppression, viral-suppression, hairpin suppression, stem-loop suppression, RNAi-based approaches and small RNA-based approaches.

[0353] A suppression DNA construct may comprise a region derived from a target gene of interest and may comprise all or part of the nucleic acid sequence of the sense strand (or antisense strand) of the target gene of interest. Depending upon the approach to be utilized, the region may be 100% identical or less than 100% identical (e.g., at least 50% or any integer between 51% and 100% identical) to all or part of the sense strand (or antisense strand) of the gene of interest.

[0354] Suppression DNA constructs are well-known in the art, are readily constructed once the target gene of interest is selected, and include, without limitation, cosuppression constructs, antisense constructs, viral-suppression constructs, hairpin suppression constructs, stem-loop suppression constructs, double-stranded RNA-producing constructs, and more generally, RNAi (RNA interference) constructs and small RNA constructs such as siRNA (short interfering RNA) constructs and miRNA (microRNA) constructs.

[0355] “Antisense inhibition” refers to the production of antisense RNA transcripts capable of suppressing the expression of the target protein.

[0356] “Antisense RNA” refers to an RNA transcript that is complementary to all or part of a target primary transcript or mRNA and that blocks the expression of a target isolated nucleic acid fragment (U.S. Pat. No. 5,107,065). The complementarity of an antisense RNA may be with any part of the specific gene transcript, i.e., at the 5′ non-coding sequence, 3′ non-coding sequence, introns or the coding sequence.

[0357] “Cosuppression” refers to the production of sense RNA transcripts capable of suppressing the expression of the target protein. “Sense” RNA refers to RNA transcript that includes the mRNA and can be translated into protein within a cell or in vitro. Cosuppression constructs in plants have been previously designed by focusing on overexpression of a nucleic acid sequence having homology to a native mRNA, in the sense orientation, which results in the reduction of all RNA having homology to the overexpressed sequence (see, Vaucheret, et al., (1998) Plant J. 16:651-659 and Gura, (2000) Nature 404:804-808).

[0358] Another variation describes the use of plant viral sequences to direct the suppression of proximal mRNA encoding sequences (PCT Publication WO 1998/36083).

[0359] Recent work has described the use of “hairpin” structures that incorporate all or part, of an mRNA encoding sequence in a complementary orientation that results in a potential “stem-loop” structure for the expressed RNA (PCT Publication WO 1999/53050). In this case the stem is formed by polynucleotides corresponding to the gene of interest inserted in either sense or anti-sense orientation with respect to the promoter and the loop is formed by some polynucleotides of the gene of interest, which do not have a complement in the construct. This increases the frequency of cosuppression or silencing in the recovered transgenic plants. For review of hairpin suppression, see, Wesley, et al., (2003) Methods in Molecular Biology, Plant Functional Genomics: Methods and Protocols 236:273-286.

[0360] A construct where the stem is formed by at least 30 nucleotides from a gene to be suppressed and the loop is formed by a random nucleotide sequence has also effectively been used for suppression (PCT Publication WO 1999/61632).

[0361] The use of poly-T and poly-A sequences to generate the stem in the stem-loop structure has also been described (PCT Publication WO 2002/00894).

[0362] Yet another variation includes using synthetic repeats to promote formation of a stem in the stem-loop structure. Transgenic organisms prepared with such recombinant DNA fragments have been shown to have reduced levels of the protein encoded by the nucleotide fragment forming the loop as described in PCT Publication WO 2002/00904.

[0363] RNA interference refers to the process of sequence-specific post-transcriptional gene silencing in animals mediated by short interfering RNAs (siRNAs) (Fire, et al., (1998) Nature 391:806). The corresponding process in plants is commonly referred to as post-transcriptional gene silencing (PTGS) or RNA silencing and is also referred to as quelling in fungi. The process of post-transcriptional gene silencing is thought to be an evolutionarily-conserved cellular defense mechanism used to prevent the expression of foreign genes and is commonly shared by diverse flora and phyla (Fire, et al., (1999) Trends Genet. 15:358). Such protection from foreign gene expression may have evolved in response to the production of double-stranded RNAs (dsRNAs) derived from viral infection or from the random integration of transposon elements into a host genome via a cellular response that specifically destroys homologous single-stranded RNA of viral genomic RNA. The presence of dsRNA in cells triggers the RNAi response through a mechanism that has yet to be fully characterized.

[0364] The presence of long dsRNAs in cells stimulates the activity of a ribonuclease Ill enzyme referred to as dicer. Dicer is involved in the processing of the dsRNA into short pieces of dsRNA known as short interfering RNAs (siRNAs) (Berstein, et al., (2001) Nature 409:363). Short interfering RNAs derived from dicer activity are typically about 21 to about 23 nucleotides in length and comprise about 19 base pair duplexes (Elbashir, et al., (2001) Genes Dev. 15:188). Dicer has also been implicated in the excision of 21- and 22-nucleotide small temporal RNAs (stRNAs) from precursor RNA of conserved structure that are implicated in translational control (Hutvagner, et al., (2001) Science 293:834). The RNAi response also features an endonuclease complex, commonly referred to as an RNA-induced silencing complex (RISC), which mediates cleavage of single-stranded RNA having sequence complementarity to the antisense strand of the siRNA duplex. Cleavage of the target RNA takes place in the middle of the region complementary to the antisense strand of the siRNA duplex (Elbashir, et al., (2001) Genes Dev. 15:188). In addition, RNA interference can also involve small RNA (e.g., miRNA) mediated gene silencing, presumably through cellular mechanisms that regulate chromatin structure and thereby prevent transcription of target gene sequences (see, e.g., Allshire, (2002) Science 297:1818-1819; Volpe, et al., (2002) Science 297:1833-1837; Jenuwein, (2002) Science 297:2215-2218 and Hall, et al., (2002) Science 297:2232-2237). As such, miRNA molecules of the disclosure can be used to mediate gene silencing via interaction with RNA transcripts or alternately by interaction with particular gene sequences, wherein such interaction results in gene silencing either at the transcriptional or post-transcriptional level.

[0365] Methods and compositions are further provided which allow for an increase in RNAi produced from the silencing element. In such embodiments, the methods and compositions employ a first polynucleotide comprising a silencing element for a target pest sequence operably linked to a promoter active in the plant cell; and, a second polynucleotide comprising a suppressor enhancer element comprising the target pest sequence or an active variant or fragment thereof operably linked to a promoter active in the plant cell. The combined expression of the silencing element with suppressor enhancer element leads to an increased amplification of the inhibitory RNA produced from the silencing element over that achievable with only the expression of the silencing element alone. In addition to the increased amplification of the specific RNAi species itself, the methods and compositions further allow for the production of a diverse population of RNAi species that can enhance the effectiveness of disrupting target gene expression. As such, when the suppressor enhancer element is expressed in a plant cell in combination with the silencing element, the methods and composition can allow for the systemic production of RNAi throughout the plant; the production of greater amounts of RNAi than would be observed with just the silencing element construct alone; and, the improved loading of RNAi into the phloem of the plant, thus providing better control of phloem feeding insects by an RNAi approach. Thus, the various methods and compositions provide improved methods for the delivery of inhibitory RNA to the target organism. See, for example, US Patent Application Publication 2009/0188008.

[0366] As used herein, a “suppressor enhancer element” comprises a polynucleotide comprising the target sequence to be suppressed or an active fragment or variant thereof. It is recognize that the suppressor enhancer element need not be identical to the target sequence, but rather, the suppressor enhancer element can comprise a variant of the target sequence, so long as the suppressor enhancer element has sufficient sequence identity to the target sequence to allow for an increased level of the RNAi produced by the silencing element over that achievable with only the expression of the silencing element. Similarly, the suppressor enhancer element can comprise a fragment of the target sequence, wherein the fragment is of sufficient length to allow for an increased level of the RNAi produced by the silencing element over that achievable with only the expression of the silencing element.

[0367] It is recognized that multiple suppressor enhancer elements from the same target sequence or from different target sequences or from different regions of the same target sequence can be employed. For example, the suppressor enhancer elements employed can comprise fragments of the target sequence derived from different region of the target sequence (i.e., from the 3′UTR, coding sequence, intron, and/or 5′UTR). Further, the suppressor enhancer element can be contained in an expression cassette, as described elsewhere herein, and in specific embodiments, the suppressor enhancer element is on the same or on a different DNA vector or construct as the silencing element. The suppressor enhancer element can be operably linked to a promoter as disclosed herein. It is recognized that the suppressor enhancer element can be expressed constitutively or alternatively, it may be produced in a stage-specific manner employing the various inducible or tissue-preferred or developmentally regulated promoters that are discussed elsewhere herein.

[0368] In specific embodiments, employing both a silencing element and the suppressor enhancer element the systemic production of RNAi occurs throughout the entire plant. In further embodiments, the plant or plant parts of the disclosure have an improved loading of RNAi into the phloem of the plant than would be observed with the expression of the silencing element construct alone and, thus provide better control of phloem feeding insects by an RNAi approach. In specific embodiments, the plants, plant parts and plant cells of the disclosure can further be characterized as allowing for the production of a diversity of RNAi species that can enhance the effectiveness of disrupting target gene expression.

[0369] In specific embodiments, the combined expression of the silencing element and the suppressor enhancer element increases the concentration of the inhibitory RNA in the plant cell, plant, plant part, plant tissue or phloem over the level that is achieved when the silencing element is expressed alone.

[0370] As used herein, an “increased level of inhibitory RNA” comprises any statistically significant increase in the level of RNAi produced in a plant having the combined expression when compared to an appropriate control plant. For example, an increase in the level of RNAi in the plant, plant part or the plant cell can comprise at least about a 1%, about a 1%-5%, about a 5%-10%, about a 10%-20%, about a 20%-30%, about a 30%-40%, about a 40%-50%, about a 50%-60%, about 60-70%, about 70%-80%, about a 80%-90%, about a 90%-100% or greater increase in the level of RNAi in the plant, plant part, plant cell or phloem when compared to an appropriate control. In other embodiments, the increase in the level of RNAi in the plant, plant part, plant cell or phloem can comprise at least about a 1 fold, about a 1 fold-5 fold, about a 5 fold-10 fold, about a 10 fold-20 fold, about a 20 fold-30 fold, about a 30 fold-40 fold, about a 40 fold-50 fold, about a 50 fold-60 fold, about 60 fold-70 fold, about 70 fold-80 fold, about a 80 fold-90 fold, about a 90 fold-100 fold or greater increase in the level of RNAi in the plant, plant part, plant cell or phloem when compared to an appropriate control. Examples of combined expression of the silencing element with suppressor enhancer element for the control of Stinkbugs and Lygus can be found in US Patent Application Publication 2011/0301223 and US Patent Application Publication 2009/0192117.

[0371] Some embodiments relate to down-regulation of expression of target genes in insect pest species by interfering ribonucleic acid (RNA) molecules. PCT Publication WO 2007/074405 describes methods of inhibiting expression of target genes in invertebrate pests including Colorado potato beetle. PCT Publication WO 2005/110068 describes methods of inhibiting expression of target genes in invertebrate pests including in particular Western corn rootworm as a means to control insect infestation. Furthermore, PCT Publication WO 2009/091864 describes compositions and methods for the suppression of target genes from insect pest species including pests from the Lygus genus. Nucleic acid molecules including RNAi for targeting the vacuolar ATPase H subunit, useful for controlling a coleopteran pest population and infestation as described in US Patent Application Publication 2012/0198586. PCT Publication WO 2012/055982 describes ribonucleic acid (RNA or double stranded RNA) that inhibits or down regulates the expression of a target gene that encodes: an insect ribosomal protein such as the ribosomal protein L19, the ribosomal protein L40 or the ribosomal protein S27A; an insect proteasome subunit such as the Rpn6 protein, the Pros 25, the Rpn2 protein, the proteasome beta 1 subunit protein or the Pros beta 2 protein; an insect β-coatomer of the COPI vesicle, the γ-coatomer of the COPI vesicle, the β′-coatomer protein or the ζ-coatomer of the COPI vesicle; an insect Tetraspanine 2 A protein which is a putative transmembrane domain protein; an insect protein belonging to the actin family such as Actin 5C; an insect ubiquitin-5E protein; an insect Sec23 protein which is a GTPase activator involved in intracellular protein transport; an insect crinkled protein which is an unconventional myosin which is involved in motor activity; an insect crooked neck protein which is involved in the regulation of nuclear alternative mRNA splicing; an insect vacuolar H+-ATPase G-subunit protein and an insect Tbp-1 such as Tat-binding protein. US Patent Application Publications 2012/029750, US 20120297501, and 2012/0322660 describe interfering ribonucleic acids (RNA or double stranded RNA) that functions upon uptake by an insect pest species to down-regulate expression of a target gene in said insect pest, wherein the RNA comprises at least one silencing element wherein the silencing element is a region of double-stranded RNA comprising annealed complementary strands, one strand of which comprises or consists of a sequence of nucleotides which is at least partially complementary to a target nucleotide sequence within the target gene. US Patent Application Publication 2012/0164205 describe potential targets for interfering double stranded ribonucleic acids for inhibiting invertebrate pests including: a Chd3 Homologous Sequence, a Beta-Tubulin Homologous Sequence, a 40 kDa V-ATPase Homologous Sequence, a EF1a Homologous Sequence, a 26S Proteosome Subunit p28 Homologous Sequence, a Juvenile Hormone Epoxide Hydrolase Homologous Sequence, a Swelling Dependent Chloride Channel Protein Homologous Sequence, a Glucose-6-Phosphate 1-Dehydrogenase Protein Homologous Sequence, an Act42A Protein Homologous Sequence, a ADP-Ribosylation Factor 1 Homologous Sequence, a Transcription Factor IIB Protein Homologous Sequence, a Chitinase Homologous Sequences, a Ubiquitin Conjugating Enzyme Homologous Sequence, a Glyceraldehyde-3-Phosphate Dehydrogenase Homologous Sequence, an Ubiquitin B Homologous Sequence, a Juvenile Hormone Esterase Homolog, and an Alpha Tubuliln Homologous Sequence.

### Use in Pesticidal Control

[0372] General methods for employing strains comprising a nucleic acid sequence of the embodiments or a variant thereof, in pesticide control or in engineering other organisms as pesticidal agents are known in the art. See, for example U.S. Pat. No. 5,039,523 and EP 0480762A2.

[0373] Microorganism hosts that are known to occupy the “phytosphere” (phylloplane, phyllosphere, rhizosphere, and/or rhizoplana) of one or more crops of interest may be selected. These microorganisms are selected so as to be capable of successfully competing in the particular environment with the wild-type microorganisms, provide for stable maintenance and expression of the gene expressing the PtIP-83 polypeptide and desirably provide for improved protection of the pesticide from environmental degradation and inactivation.

[0374] Such microorganisms include bacteria, algae, and fungi. Of particular interest are microorganisms such as bacteria, e.g., Pseudomonas, Erwinia, Serratia, Klebsiella, Xanthomonas, Streptomyces, Rhizobium, Rhodopseudomonas, Methylius, Agrobacterium, Acetobacter, Lactobacillus, Arthrobacter, Azotobacter, Leuconostoc, and Alcaligenes, fungi, particularly yeast, e.g., Saccharomyces, Cryptococcus, Kluyveromyces, Sporobolomyces, Rhodotorula, and Aureobasidium. Of particular interest are such phytosphere bacterial species as Pseudomonas syringae, Pseudomonas fluorescens, Pseudomonas chlororaphis, Serratia marcescens, Acetobacter xylinum, Agrobacteria, Rhodopseudomonas spheroides, Xanthomonas campestris, Rhizobium melioti, Alcaligenes entrophus, Clavibacter xyli and Azotobacter vinelandii and phytosphere yeast species such as Rhodotorula rubra, R. glutinis, R. marina, R. aurantiaca, Cryptococcus albidus, C. diffluens, C. laurentii, Saccharomyces rosei, S. pretoriensis, S. cerevisiae, Sporobolomyces roseus, S. odorus, Kluyveromyces veronae, and Aureobasidium pollulans. Of particular interest are the pigmented microorganisms. Host organisms of particular interest include yeast, such as Rhodotorula spp., Aureobasidium spp., Saccharomyces spp. (such as S. cerevisiae), Sporobolomyces spp., phylloplane organisms such as Pseudomonas spp. (such as P. aeruginosa, P. fluorescens, P. chlororaphis), Erwinia spp., and Flavobacterium spp., and other such organisms, including Agrobacterium tumefaciens, E. coli, Bacillus subtilis, Bacillus cereus and the like.

[0375] Genes encoding the PtIP-83 polypeptide of the embodiments can be introduced into microorganisms that multiply on plants (epiphytes) to deliver PtIP-83 polypeptide to potential target pests. Epiphytes, for example, can be gram-positive or gram-negative bacteria.

[0376] Root-colonizing bacteria, for example, can be isolated from the plant of interest by methods known in the art. Specifically, a Bacillus cereus strain that colonizes roots can be isolated from roots of a plant (see, for example, Handelsman et al. (1991) Appl. Environ. Microbiol. 56:713-718). Genes encoding the PtIP-83 polypeptide of the embodiments can be introduced into a root-colonizing Bacillus cereus by standard methods known in the art.

[0377] Genes encoding PtIP-83 polypeptides can be introduced, for example, into the root-colonizing Bacillus by means of electro transformation. Specifically, genes encoding the PtIP-83 polypeptides can be cloned into a shuttle vector, for example, pHT3101 (Lerecius, et al., (1989) FEMS Microbiol. Letts. 60:211-218. The shuttle vector pHT3101 containing the coding sequence for the particular PtIP-83 polypeptide gene can, for example, be transformed into the root-colonizing Bacillus by means of electroporation (Lerecius, et al., (1989) FEMS Microbiol. Letts. 60:211-218).

[0378] Expression systems can be designed so that PtIP-83 polypeptides are secreted outside the cytoplasm of gram-negative bacteria, such as E. coli, for example. Advantages of having a PtIP-83 polypeptide secreted are: (1) avoidance of potential cytotoxic effects of the PtIP-83 polypeptide expressed; and (2) improvement in the efficiency of purification of the PtIP-83 polypeptide, including, but not limited to, increased efficiency in the recovery and purification of the protein per volume cell broth and decreased time and/or costs of recovery and purification per unit protein.

[0379] PtIP-83 polypeptides can be made to be secreted in E. coli, for example, by fusing an appropriate E. coli signal peptide to the amino-terminal end of the PtIP-83 polypeptide. Signal peptides recognized by E. coli can be found in proteins already known to be secreted in E. coli, for example the OmpA protein (Ghrayeb, et al., (1984) EMBO J, 3:2437-2442). OmpA is a major protein of the E. coli outer membrane, and thus its signal peptide is thought to be efficient in the translocation process. Also, the OmpA signal peptide does not need to be modified before processing as may be the case for other signal peptides, for example lipoprotein signal peptide (Duffaud, et al., (1987) Meth. Enzymol. 153:492).

[0380] PtIP-83 polypeptides of the embodiments can be fermented in a bacterial host and the resulting bacteria processed and used as a microbial spray in the same manner that Bt strains have been used as insecticidal sprays. In the case of a PtIP-83 polypeptide(s that is secreted from Bacillus, the secretion signal is removed or mutated using procedures known in the art. Such mutations and/or deletions prevent secretion of the PtIP-83 polypeptide(s) into the growth medium during the fermentation process. The PtIP-83 polypeptide is retained within the cell, and the cells are then processed to yield the encapsulated PtIP-83 polypeptide. Any suitable microorganism can be used for this purpose. Pseudomonas has been used to express Bt toxins as encapsulated proteins and the resulting cells processed and sprayed as an insecticide (Gaertner, et al., (1993), in: Advanced Engineered Pesticides, ed. Kim).

[0381] Alternatively, the PtIP-83 polypeptide is produced by introducing a heterologous gene into a cellular host. Expression of the heterologous gene results, directly or indirectly, in the intracellular production and maintenance of the pesticide. These cells are then treated under conditions that prolong the activity of the toxin produced in the cell when the cell is applied to the environment of target pest(s). The resulting product retains the toxicity of the toxin. These naturally encapsulated PtIP-83 polypeptide may then be formulated in accordance with conventional techniques for application to the environment hosting a target pest, e.g., soil, water, and foliage of plants. See, for example EPA 0192319, and the references cited therein.

### Pesticidal Compositions

[0382] In some embodiments the active ingredients can be applied in the form of compositions and can be applied to the crop area or plant to be treated, simultaneously or in succession, with other compounds. These compounds can be fertilizers, weed killers, Cryoprotectants, surfactants, detergents, pesticidal soaps, dormant oils, polymers, and/or time-release or biodegradable carrier formulations that permit long-term dosing of a target area following a single application of the formulation. They can also be selective herbicides, chemical insecticides, virucides, microbicides, amoebicides, pesticides, fungicides, bacteriocides, nematocides, molluscicides or mixtures of several of these preparations, if desired, together with further agriculturally acceptable carriers, surfactants or application-promoting adjuvants customarily employed in the art of formulation. Suitable carriers and adjuvants can be solid or liquid and correspond to the substances ordinarily employed in formulation technology, e.g. natural or regenerated mineral substances, solvents, dispersants, wetting agents, tackifiers, binders or fertilizers. Likewise the formulations may be prepared into edible “baits” or fashioned into pest “traps” to permit feeding or ingestion by a target pest of the pesticidal formulation.

[0383] Methods of applying an active ingredient or an agrochemical composition that contains at least one of the PtIP-83 polypeptide produced by the bacterial strains include leaf application, seed coating and soil application. The number of applications and the rate of application depend on the intensity of infestation by the corresponding pest.

[0384] The composition may be formulated as a powder, dust, pellet, granule, spray, emulsion, colloid, solution or such like, and may be prepared by such conventional means as desiccation, lyophilization, homogenation, extraction, filtration, centrifugation, sedimentation or concentration of a culture of cells comprising the polypeptide. In all such compositions that contain at least one such pesticidal polypeptide, the polypeptide may be present in a concentration of from about 1% to about 99% by weight.

[0385] Lepidopteran, Dipteran, Heteropteran, nematode, Hemiptera or Coleopteran pests may be killed or reduced in numbers in a given area by the methods of the disclosure or may be prophylactically applied to an environmental area to prevent infestation by a susceptible pest. Preferably the pest ingests or is contacted with, a pesticidally-effective amount of the polypeptide. “Pesticidally-effective amount” as used herein refers to an amount of the pesticide that is able to bring about death to at least one pest or to noticeably reduce pest growth, feeding or normal physiological development. This amount will vary depending on such factors as, for example, the specific target pests to be controlled, the specific environment, location, plant, crop or agricultural site to be treated, the environmental conditions and the method, rate, concentration, stability, and quantity of application of the pesticidally-effective polypeptide composition. The formulations may also vary with respect to climatic conditions, environmental considerations, and/or frequency of application and/or severity of pest infestation.

[0386] The pesticide compositions described may be made by formulating either the bacterial cell, Crystal and/or spore suspension or isolated protein component with the desired agriculturally-acceptable carrier. The compositions may be formulated prior to administration in an appropriate means such as lyophilized, freeze-dried, desiccated or in an aqueous carrier, medium or suitable diluent, such as saline or other buffer. The formulated compositions may be in the form of a dust or granular material or a suspension in oil (vegetable or mineral) or water or oil/water emulsions or as a wettable powder or in combination with any other carrier material suitable for agricultural application. Suitable agricultural carriers can be solid or liquid and are well known in the art. The term “agriculturally-acceptable carrier” covers all adjuvants, inert components, dispersants, surfactants, tackifiers, binders, etc. that are ordinarily used in pesticide formulation technology; these are well known to those skilled in pesticide formulation. The formulations may be mixed with one or more solid or liquid adjuvants and prepared by various means, e.g., by homogeneously mixing, blending and/or grinding the pesticidal composition with suitable adjuvants using conventional formulation techniques. Suitable formulations and application methods are described in U.S. Pat. No. 6,468,523, herein incorporated by reference. The plants can also be treated with one or more chemical compositions, including one or more herbicide, insecticides or fungicides. Exemplary chemical compositions include: Fruits/Vegetables Herbicides: Atrazine, Bromacil, Diuron, Glyphosate, Linuron, Metribuzin, Simazine, Trifluralin, Fluazifop, Glufosinate, Halo sulfuron Gowan, Paraquat, Propyzamide, Sethoxydim, Butafenacil, Halosulfuron, Indaziflam; Fruits/Vegetables Insecticides: Aldicarb, Bacillus thuriengiensis, Carbaryl, Carbofuran, Chlorpyrifos, Cypermethrin, Deltamethrin, Diazinon, Malathion, Abamectin, Cyfluthrin/beta-cyfluthrin, Esfenvalerate, Lambda-cyhalothrin, Acequinocyl, Bifenazate, Methoxyfenozide, Novaluron, Chromafenozide, Thiacloprid, Dinotefuran, FluaCrypyrim, Tolfenpyrad, Clothianidin, Spirodiclofen, Gamma-cyhalothrin, Spiromesifen, Spinosad, Rynaxypyr, Cyazypyr, Spinoteram, Triflumuron, Spirotetramat, Imidacloprid, Flubendiamide, Thiodicarb, Metaflumizone, Sulfoxaflor, Cyflumetofen, Cyanopyrafen, Imidacloprid, Clothianidin, Thiamethoxam, Spinotoram, Thiodicarb, Flonicamid, Methiocarb, Emamectin-benzoate, Indoxacarb, Forthiazate, Fenamiphos, Cadusaphos, Pyriproxifen, Fenbutatin-oxid, Hexthiazox, Methomyl, 4-[[(6-Chlorpyridin-3-yl)methyl](2,2-difluorethyl)amino]furan-2(5H)-on; Fruits/Vegetables Fungicides: Carbendazim, Chlorothalonil, EBDCs, Sulphur, Thiophanate-methyl, Azoxystrobin, Cymoxanil, Fluazinam, Fosetyl, Iprodione, Kresoxim-methyl, Metalaxyl/mefenoxam, Trifloxystrobin, Ethaboxam, Iprovalicarb, Trifloxystrobin, Fenhexamid, Oxpoconazole fumarate, Cyazofamid, Fenamidone, Zoxamide, Picoxystrobin, Pyraclostrobin, Cyflufenamid, Boscalid; Cereals Herbicides: Isoproturon, Bromoxynil, loxynil, Phenoxies, Chlorsulfuron, Clodinafop, Diclofop, Diflufenican, Fenoxaprop, Florasulam, Fluoroxypyr, Metsulfuron, Triasulfuron, Flucarbazone, lodosulfuron, Propoxycarbazone, Picolinafen, Mesosulfuron, Beflubutamid, Pinoxaden, Amidosulfuron, Thifensulfuron Methyl, Tribenuron, Flupyrsulfuron, Sulfosulfuron, Pyrasulfotole, Pyroxsulam, Flufenacet, Tralkoxydim, Pyroxasulfon; Cereals Fungicides: Carbendazim, Chlorothalonil, Azoxystrobin, Cyproconazole, Cyprodinil, Fenpropimorph, Epoxiconazole, Kresoxim-methyl, Quinoxyfen, Tebuconazole, Trifloxystrobin, Simeconazole, Picoxystrobin, Pyraclostrobin, Dimoxystrobin, Prothioconazole, Fluoxastrobin; Cereals Insecticides: Dimethoate, Lambda-cyhalthrin, Deltamethrin, alpha-Cypermethrin, β-cyfluthrin, Bifenthrin, Imidacloprid, Clothianidin, Thiamethoxam, Thiacloprid, Acetamiprid, Dinetofuran, Clorphyriphos, Metamidophos, Oxidemethon-methyl, Pirimicarb, Methiocarb; Maize Herbicides: Atrazine, Alachlor, Bromoxynil, Acetochlor, Dicamba, Clopyralid, (S-) Dimethenamid, Glufosinate, Glyphosate, Isoxaflutole, (S-)Metolachlor, Mesotrione, Nicosulfuron, Primisulfuron, Rimsulfuron, Sulcotrione, Foramsulfuron, Topramezone, Tembotrione, Saflufenacil, Thiencarbazone, Flufenacet, Pyroxasulfon; Maize Insecticides: Carbofuran, Chlorpyrifos, Bifenthrin, Fipronil, Imidacloprid, Lambda-Cyhalothrin, Tefluthrin, Terbufos, Thiamethoxam, Clothianidin, Spiromesifen, Flubendiamide, Triflumuron, Rynaxypyr, Deltamethrin, Thiodicarb, p-Cyfluthrin, Cypermethrin, Bifenthrin, Lufenuron, Triflumoron, Tefluthrin, Tebupirimphos, Ethiprole, Cyazypyr, Thiacloprid, Acetamiprid, Dinetofuran, Avermectin, Methiocarb, Spirodiclofen, Spirotetramat; Maize Fungicides: Fenitropan, Thiram, Prothioconazole, Tebuconazole, Trifloxystrobin; Rice Herbicides: Butachlor, Propanil, Azimsulfuron, Bensulfuron, Cyhalofop, Daimuron, Fentrazamide, Imazosulfuron, Mefenacet, Oxaziclomefone, Pyrazosulfuron, Pyributicarb, Quinclorac, Thiobencarb, Indanofan, Flufenacet, Fentrazamide, Halosulfuron, Oxaziclomefone, Benzobicyclon, Pyriftalid, Penoxsulam, Bispyribac, Oxadiargyl, Ethoxysulfuron, Pretilachlor, Mesotrione, Tefuryltrione, Oxadiazone, Fenoxaprop, Pyrimisulfan; Rice Insecticides: Diazinon, Fenitrothion, Fenobucarb, Monocrotophos, Benfuracarb, Buprofezin, Dinotefuran, Fipronil, Imidacloprid, Isoprocarb, Thiacloprid, Chromafenozide, Thiacloprid, Dinotefuran, Clothianidin, Ethiprole, Flubendiamide, Rynaxypyr, Deltamethrin, Acetamiprid, Thiamethoxam, Cyazypyr, Spinosad, Spinotoram, Emamectin-Benzoate, Cypermethrin, Chlorpyriphos, Cartap, Methamidophos, Etofenprox, Triazophos, 4-[[(6-Chlorpyridin-3-yl)methyl](2,2-difluorethyl)amino]furan-2(5H)-on, Carbofuran, Benfuracarb; Rice Fungicides: Thiophanate-methyl, Azoxystrobin, Carpropamid, Edifenphos, Ferimzone, Iprobenfos, Isoprothiolane, Pencycuron, Probenazole, Pyroquilon, Tricyclazole, Trifloxystrobin, Diclocymet, Fenoxanil, Simeconazole, Tiadinil; Cotton Herbicides: Diuron, Fluometuron, MSMA, Oxyfluorfen, Prometryn, Trifluralin, Carfentrazone, Clethodim, Fluazifop-butyl, Glyphosate, Norflurazon, Pendimethalin, Pyrithiobac-sodium, Trifloxysulfuron, Tepraloxydim, Glufosinate, Flumioxazin, Thidiazuron; Cotton Insecticides: Acephate, Aldicarb, Chlorpyrifos, Cypermethrin, Deltamethrin, Malathion, Monocrotophos, Abamectin, Acetamiprid, Emamectin Benzoate, Imidacloprid, Indoxacarb, Lambda-Cyhalothrin, Spinosad, Thiodicarb, Gamma-Cyhalothrin, Spiromesifen, Pyridalyl, Flonicamid, Flubendiamide, Triflumuron, Rynaxypyr, Beta-Cyfluthrin, Spirotetramat, Clothianidin, Thiamethoxam, Thiacloprid, Dinetofuran, Flubendiamide, Cyazypyr, Spinosad, Spinotoram, gamma Cyhalothrin, 4-[[(6-Chlorpyridin-3-yl)methyl](2,2-difluorethyl)amino]furan-2(5H)-on, Thiodicarb, Avermectin, Flonicamid, Pyridalyl, Spiromesifen, Sulfoxaflor, Profenophos, Thriazophos, Endosulfan; Cotton Fungicides: Etridiazole, Metalaxyl, Quintozene; Soybean Herbicides: Alachlor, Bentazone, Trifluralin, Chlorimuron-Ethyl, Cloransulam-Methyl, Fenoxaprop, Fomesafen, Fluazifop, Glyphosate, Imazamox, Imazaquin, Imazethapyr, (S-)Metolachlor, Metribuzin, Pendimethalin, Tepraloxydim, Glufosinate; Soybean Insecticides: Lambda-cyhalothrin, Methomyl, Parathion, Thiocarb, Imidacloprid, Clothianidin, Thiamethoxam, Thiacloprid, Acetamiprid, Dinetofuran, Flubendiamide, Rynaxypyr, Cyazypyr, Spinosad, Spinotoram, Emamectin-Benzoate, Fipronil, Ethiprole, Deltamethrin, p-Cyfluthrin, gamma and lambda Cyhalothrin, 4-[[(6-Chlorpyridin-3-yl)methyl](2,2-difluorethyl)amino]furan-2(5H)-on, Spirotetramat, Spinodiclofen, Triflumuron, Flonicamid, Thiodicarb, beta-Cyfluthrin; Soybean Fungicides: Azoxystrobin, Cyproconazole, Epoxiconazole, Flutriafol, Pyraclostrobin, Tebuconazole, Trifloxystrobin, Prothioconazole, Tetraconazole; Sugarbeet Herbicides: Chloridazon, Desmedipham, Ethofumesate, Phenmedipham, Triallate, Clopyralid, Fluazifop, Lenacil, Metamitron, Quinmerac, Cycloxydim, Triflusulfuron, Tepraloxydim, Quizalofop; Sugarbeet Insecticides: Imidacloprid, Clothianidin, Thiamethoxam, Thiacloprid, Acetamiprid, Dinetofuran, Deltamethrin, p-Cyfluthrin, gamma/lambda Cyhalothrin, 4-[[(6-Chlorpyridin-3-yl)methyl](2,2-difluorethyl)amino]furan-2(5H)-on, Tefluthrin, Rynaxypyr, Cyaxypyr, Fipronil, Carbofuran; Canola Herbicides: Clopyralid, Diclofop, Fluazifop, Glufosinate, Glyphosate, Metazachlor, Trifluralin Ethametsulfuron, Quinmerac, Quizalofop, Clethodim, Tepraloxydim; Canola Fungicides: Azoxystrobin, Carbendazim, Fludioxonil, Iprodione, Prochloraz, Vinclozolin; Canola Insecticides: Carbofuran organophosphates, Pyrethroids, Thiacloprid, Deltamethrin, Imidacloprid, Clothianidin, Thiamethoxam, Acetamiprid, Dinetofuran, p-Cyfluthrin, gamma and lambda Cyhalothrin, tau-Fluvaleriate, Ethiprole, Spinosad, Spinotoram, Flubendiamide, Rynaxypyr, Cyazypyr, 4-[[(6-Chlorpyridin-3-yl)methyl](2,2-difluorethyl)amino]furan-2(5H)-on.

[0387] In some embodiments the herbicide is Atrazine, Bromacil, Diuron, Chlorsulfuron, Metsulfuron, Thifensulfuron Methyl, Tribenuron, Acetochlor, Dicamba, Isoxaflutole, Nicosulfuron, Rimsulfuron, Pyrithiobac-sodium, Flumioxazin, Chlorimuron-Ethyl, Metribuzin, Quizalofop, S-metolachlor, Hexazinne or combinations thereof.

[0388] In some embodiments the insecticide is Esfenvalerate, Chlorantraniliprole, Methomyl, Indoxacarb, Oxamyl or combinations thereof.

### Pesticidal and Insecticidal Activity

[0389] “Pest” includes but is not limited to, insects, fungi, bacteria, nematodes, mites, ticks and the like. Insect pests include insects selected from the orders Coleoptera, Diptera, Hymenoptera, Lepidoptera, Mallophaga, Homoptera, Hemiptera Orthroptera, Thysanoptera, Dermaptera, Isoptera, Anoplura, Siphonaptera, Trichoptera, etc., particularly Lepidoptera and Coleoptera.

[0390] Those skilled in the art will recognize that not all compounds are equally effective against all pests. Compounds of the embodiments display activity against insect pests, which may include economically important agronomic, forest, greenhouse, nursery ornamentals, food and fiber, public and animal health, domestic and commercial structure, household and stored product pests.

[0391] Larvae of the order Lepidoptera include, but are not limited to, armyworms, cutworms, loopers and heliothines in the family Noctuidae Spodoptera frugiperda JE Smith (fall armyworm); S. exigua Hübner (beet armyworm); S. litura Fabricius (tobacco cutworm, cluster caterpillar); Mamestra configurata Walker (bertha armyworm); M. brassicae Linnaeus (cabbage moth); Agrotis ipsilon Hufnagel (black cutworm); A. orthogonia Morrison (western cutworm); A. subterranea Fabricius (granulate cutworm); Alabama argillacea Hübner (cotton leaf worm); Trichoplusia ni Hübner (cabbage looper); Pseudoplusia includens Walker (soybean looper); Anticarsia gemmatalis Hübner (velvetbean caterpillar); Hypena scabra Fabricius (green cloverworm); Heliothis virescens Fabricius (tobacco budworm); Pseudaletia unipuncta Haworth (armyworm); Athetis mindara Barnes and Mcdunnough (rough skinned cutworm); Euxoa messoria Harris (darksided cutworm); Earias insulana Boisduval (spiny bollworm); E. vittella Fabricius (spotted bollworm); Helicoverpa armigera Hübner (American bollworm); H. zea Boddie (corn earworm or cotton bollworm); Melanchra picta Harris (zebra caterpillar); Egira (Xylomyges) curialis Grote (citrus cutworm); borers, casebearers, webworms, coneworms, and skeletonizers from the family Pyralidae Ostrinia nubilalis Hübner (European corn borer); Amyelois transitella Walker (naval orangeworm); Anagasta kuehniella Zeller (Mediterranean flour moth); Cadra cautella Walker (almond moth); Chilo suppressalis Walker (rice stem borer); C. partellus, (sorghum borer); Corcyra cephalonica Stainton (rice moth); Crambus caliginosellus Clemens (corn root webworm); C. teterrellus Zincken (bluegrass webworm); Cnaphalocrocis medinalis Guenée (rice leaf roller); Desmia funeralis Hübner (grape leaffolder); Diaphania hyalinata Linnaeus (melon worm); D. nitidalis Stoll (pickleworm); Diatraea grandiosella Dyar (southwestern corn borer), D. saccharalis Fabricius (surgarcane borer); Eoreuma loftini Dyar (Mexican rice borer); Ephestia elutella Hübner (tobacco (cacao) moth); Galleria mellonella Linnaeus (greater wax moth); Herpetogramma licarsisalis Walker (sod webworm); Homoeosoma electellum Hulst (sunflower moth); Elasmopalpus lignosellus Zeller (lesser cornstalk borer); Achroia grisella Fabricius (lesser wax moth); Loxostege sticticalis Linnaeus (beet webworm); Orthaga thyrisalis Walker (tea tree web moth); Maruca testulalis Geyer (bean pod borer); Plodia interpunctella Hübner (Indian meal moth); Scirpophaga incertulas Walker (yellow stem borer); Udea rubigalis Guenée (celery leaftier); and leafrollers, budworms, seed worms and fruit worms in the family Tortricidae Acleris gloverana Walsingham (Western blackheaded budworm); A. variana Fernald (Eastern blackheaded budworm); Archips argyrospila Walker (fruit tree leaf roller); A. rosana Linnaeus (European leaf roller); and other Archips species, Adoxophyes orana Fischer von Rösslerstamm (summer fruit tortrix moth); Cochylis hospes Walsingham (banded sunflower moth); Cydia latiferreana Walsingham (filbertworm); C. pomonella Linnaeus (coding moth); Platynota flavedana Clemens (variegated leafroller); P. stultana Walsingham (omnivorous leafroller); Lobesia botrana Denis & Schiffermuller (European grape vine moth); Spilonota ocellana Denis & Schiffermüller (eyespotted bud moth); Endopiza viteana Clemens (grape berry moth); Eupoecilia ambiguella Hübner (vine moth); Bonagota salubricola Meyrick (Brazilian apple leafroller); Grapholita molesta Busck (oriental fruit moth); Suleima helianthana Riley (sunflower bud moth); Argyrotaenia spp.; Choristoneura spp.

[0392] Selected other agronomic pests in the order Lepidoptera include, but are not limited to, Alsophila pometaria Harris (fall cankerworm); Anarsia lineatella Zeller (peach twig borer); Anisota senatoria J. E. Smith (orange striped oakworm); Antheraea pernyi Guérin-Méneville (Chinese Oak Tussah Moth); Bombyx mori Linnaeus (Silkworm); Bucculatrix thurberiella Busck (cotton leaf perforator); Colias eurytheme Boisduval (alfalfa caterpillar); Datana integerrima Grote & Robinson (walnut caterpillar); Dendrolimus sibiricus Tschetwerikov (Siberian silk moth), Ennomos subsignaria Hübner (elm spanworm); Erannis tiliaria Harris (linden looper); Euproctis chrysorrhoea Linnaeus (browntail moth); Harrisina americana Guérin-Méneville (grapeleaf skeletonizer); Hemileuca oliviae Cockrell (range caterpillar); Hyphantria cunea Drury (fall webworm); Keiferia lycopersicella Walsingham (tomato pinworm); Lambdina fiscellaria fiscellaria Hulst (Eastern hemlock looper); L. fiscellaria lugubrosa Hulst (Western hemlock looper); Leucoma salicis Linnaeus (satin moth); Lymantria dispar Linnaeus (gypsy moth); Manduca quinquemaculata Haworth (five spotted hawk moth, tomato hornworm); M. sexta Haworth (tomato hornworm, tobacco hornworm); Operophtera brumata Linnaeus (winter moth); Paleacrita vernata Peck (spring cankerworm); Papilio cresphontes Cramer (giant swallowtail orange dog); Phryganidia californica Packard (California oakworm); Phyllocnistis citrella Stainton (citrus leafminer); Phyllonorycter blancardella Fabricius (spotted tentiform leafminer); Pieris brassicae Linnaeus (large white butterfly); P. rapae Linnaeus (small white butterfly); P. napi Linnaeus (green veined white butterfly); Platyptilia carduidactyla Riley (artichoke plume moth); Plutella xylostella Linnaeus (diamondback moth); Pectinophora gossypiella Saunders (pink bollworm); Pontia protodice Boisduval and Leconte (Southern cabbageworm); Sabulodes aegrotata Guenée (omnivorous looper); Schizura concinna J. E. Smith (red humped caterpillar); Sitotroga cerealella Olivier (Angoumois grain moth); Thaumetopoea pityocampa Schiffermuller (pine processionary caterpillar); Tineola bisselliella Hummel (webbing clothesmoth); Tuta absoluta Meyrick (tomato leafminer); Yponomeuta padella Linnaeus (ermine moth); Heliothis subflexa Guenée; Malacosoma spp. and Orgyia spp.

[0393] Of interest are larvae and adults of the order Coleoptera including weevils from the families Anthribidae, Bruchidae and Curculionidae (including, but not limited to: Anthonomus grandis Boheman (boll weevil); Lissorhoptrus oryzophilus Kuschel (rice water weevil); Sitophilus granarius Linnaeus (granary weevil); S. oryzae Linnaeus (rice weevil); Hypera punctata Fabricius (clover leaf weevil); Cylindrocopturus adspersus LeConte (sunflower stem weevil); Smicronyx fulvus LeConte (red sunflower seed weevil); S. sordidus LeConte (gray sunflower seed weevil); Sphenophorus maidis Chittenden (maize billbug)); flea beetles, cucumber beetles, rootworms, leaf beetles, potato beetles and leafminers in the family Chrysomelidae (including, but not limited to: Leptinotarsa decemlineata Say (Colorado potato beetle); Diabrotica virgifera virgifera LeConte (western corn rootworm); D. barberi Smith and Lawrence (northern corn rootworm); D. undecimpunctata howardi Barber (southern corn rootworm); Chaetocnema pulicaria Melsheimer (corn flea beetle); Phyllotreta cruciferae Goeze (Crucifer flea beetle); Phyllotreta striolata (stripped flea beetle); Colaspis brunnea Fabricius (grape colaspis); Oulema melanopus Linnaeus (cereal leaf beetle); Zygogramma exclamationis Fabricius (sunflower beetle)); beetles from the family Coccinellidae (including, but not limited to: Epilachna varivestis Mulsant (Mexican bean beetle)); chafers and other beetles from the family Scarabaeidae (including, but not limited to: Popillia japonica Newman (Japanese beetle); Cyclocephala borealis Arrow (northern masked chafer, white grub); C. immaculata Olivier (southern masked chafer, white grub); Rhizotrogus majalis Razoumowsky (European chafer); Phyllophaga crinita Burmeister (white grub); Ligyrus gibbosus De Geer (carrot beetle)); carpet beetles from the family Dermestidae; wireworms from the family Elateridae, Eleodes spp., Melanotus spp.; Conoderus spp.; Limonius spp.; Agriotes spp.; Ctenicera spp.; Aeolus spp.; bark beetles from the family Scolytidae and beetles from the family Tenebrionidae.

[0394] Adults and immatures of the order Diptera are of interest, including leafminers Agromyza parvicornis Loew (corn blotch leafminer); midges (including, but not limited to: Contarinia sorghicola Coquillett (sorghum midge); Mayetiola destructor Say (Hessian fly); Sitodiplosis mosellana Géhin (wheat midge); Neolasioptera murtfeldtiana Felt, (sunflower seed midge)); fruit flies (Tephritidae), Oscinella frit Linnaeus (fruit flies); maggots (including, but not limited to: Delia platura Meigen (seedcorn maggot); D. coarctata Fallen (wheat bulb fly) and other Delia spp., Meromyza americana Fitch (wheat stem maggot); Musca domestica Linnaeus (house flies); Fannia canicularis Linnaeus, F. femoralis Stein (lesser house flies); Stomoxys calcitrans Linnaeus (stable flies)); face flies, horn flies, blow flies, Chrysomya spp.; Phormia spp. and other muscoid fly pests, horse flies Tabanus spp.; bot flies Gastrophilus spp.; Oestrus spp.; cattle grubs Hypoderma spp.; deer flies Chrysops spp.; Melophagus ovinus Linnaeus (keds) and other Brachycera, mosquitoes Aedes spp.; Anopheles spp.; Culex spp.; black flies Prosimulium spp.; Simulium spp.; biting midges, sand flies, sciarids, and other Nematocera.

[0395] Included as insects of interest are adults and nymphs of the orders Hemiptera and Homoptera such as, but not limited to, adelgids from the family Adelgidae, plant bugs from the family Miridae, cicadas from the family Cicadidae, leafhoppers, Empoasca spp.; from the family Cicadellidae, planthoppers from the families Cixiidae, Flatidae, Fulgoroidea, Issidae and Delphacidae, treehoppers from the family Membracidae, psyllids from the family Psyllidae, whiteflies from the family Aleyrodidae, aphids from the family Aphididae, phylloxera from the family Phylloxeridae, mealybugs from the family Pseudococcidae, scales from the families Asterolecanidae, Coccidae, Dactylopiidae, Diaspididae, Eriococcidae Ortheziidae, Phoenicococcidae and Margarodidae, lace bugs from the family Tingidae, stink bugs from the family Pentatomidae, cinch bugs, Blissus spp.; and other seed bugs from the family Lygaeidae, spittlebugs from the family Cercopidae squash bugs from the family Coreidae and red bugs and cotton stainers from the family Pyrrhocoridae.

[0396] Agronomically important members from the order Homoptera further include, but are not limited to: Acyrthisiphon pisum Harris (pea aphid); Aphis craccivora Koch (cowpea aphid); A. fabae Scopoli (black bean aphid); A. gossypii Glover (cotton aphid, melon aphid); A. maidiradicis Forbes (corn root aphid); A. pomi De Geer (apple aphid); A. spiraecola Patch (spirea aphid); Aulacorthum solani Kaltenbach (foxglove aphid); Chaetosiphon fragaefolii Cockerell (strawberry aphid); Diuraphis noxia Kurdjumov/Mordvilko (Russian wheat aphid); Dysaphis plantaginea Paaserini (rosy apple aphid); Eriosoma lanigerum Hausmann (woolly apple aphid); Brevicoryne brassicae Linnaeus (cabbage aphid); Hyalopterus pruni Geoffroy (mealy plum aphid); Lipaphis erysimi Kaltenbach (turnip aphid); Metopolophium dirrhodum Walker (cereal aphid); Macrosiphum euphorbiae Thomas (potato aphid); Myzus persicae Sulzer (peach-potato aphid, green peach aphid); Nasonovia ribisnigri Mosley (lettuce aphid); Pemphigus spp. (root aphids and gall aphids); Rhopalosiphum maidis Fitch (corn leaf aphid); R. padi Linnaeus (bird cherry-oat aphid); Schizaphis graminum Rondani (greenbug); Sipha flava Forbes (yellow sugarcane aphid); Sitobion avenae Fabricius (English grain aphid); Therioaphis maculata Buckton (spotted alfalfa aphid); Toxoptera aurantii Boyer de Fonscolombe (black citrus aphid) and T. citricida Kirkaldy (brown citrus aphid); Adelges spp. (adelgids); Phylloxera devastatrix Pergande (pecan phylloxera); Bemisia tabaci Gennadius (tobacco whitefly, sweetpotato whitefly); B. argentifolii Bellows & Perring (silverleaf whitefly); Dialeurodes citri Ashmead (citrus whitefly); Trialeurodes abutiloneus (bandedwinged whitefly) and T. vaporariorum Westwood (greenhouse whitefly); Empoasca fabae Harris (potato leafhopper); Laodelphax striatellus Fallen (smaller brown planthopper); Macrolestes quadrilineatus Forbes (aster leafhopper); Nephotettix cinticeps Uhler (green leafhopper); N. nigropictus Stal (rice leafhopper); Nilaparvata lugens Stal (brown planthopper); Peregrinus maidis Ashmead (corn planthopper); Sogatella furcifera Horvath (white-backed planthopper); Sogatodes orizicola Muir (rice delphacid); Typhlocyba pomaria McAtee (white apple leafhopper); Erythroneoura spp. (grape leafhoppers); Magicicada septendecim Linnaeus (periodical cicada); Icerya purchasi Maskell (cottony cushion scale); Quadraspidiotus perniciosus Comstock (San Jose scale); Planococcus citri Risso (citrus mealybug); Pseudococcus spp. (other mealybug complex); Cacopsylla pyricola Foerster (pear psylla); Trioza diospyri Ashmead (persimmon psylla).

[0397] Agronomically important species of interest from the order Hemiptera include, but are not limited to: Acrosternum hilare Say (green stink bug); Anasa tristis De Geer (squash bug); Blissus leucopterus leucopterus Say (chinch bug); Corythuca gossypii Fabricius (cotton lace bug); Cyrtopeltis modesta Distant (tomato bug); Dysdercus suturellus Herrich-Schäffer (cotton stainer); Euschistus servus Say (brown stink bug); E. variolarius Palisot de Beauvois (one-spotted stink bug); Graptostethus spp. (complex of seed bugs); Leptoglossus corculus Say (leaf-footed pine seed bug); Lygus lineolaris Palisot de Beauvois (tarnished plant bug); L. hesperus Knight (Western tarnished plant bug); L. pratensis Linnaeus (common meadow bug); L. rugulipennis Poppius (European tarnished plant bug); Lygocoris pabulinus Linnaeus (common green capsid); Nezara viridula Linnaeus (southern green stink bug); Oebalus pugnax Fabricius (rice stink bug); Oncopeltus fasciatus Dallas (large milkweed bug); Pseudatomoscelis seriatus Reuter (cotton fleahopper).

[0398] Furthermore, embodiments may be effective against Hemiptera such, Calocoris norvegicus Gmelin (strawberry bug); Orthops campestris Linnaeus; Plesiocoris rugicollis Fallen (apple capsid); Cyrtopeltis modestus Distant (tomato bug); Cyrtopeltis notatus Distant (suckfly); Spanagonicus albofasciatus Reuter (whitemarked fleahopper); Diaphnocoris chlorionis Say (honeylocust plant bug); Labopidicola allii Knight (onion plant bug); Pseudatomoscelis seriatus Reuter (cotton fleahopper); Adelphocoris rapidus Say (rapid plant bug); Poecilocapsus lineatus Fabricius (four-lined plant bug); Nysius ericae Schilling (false chinch bug); Nysius raphanus Howard (false chinch bug); Nezara viridula Linnaeus (Southern green stink bug); Eurygaster spp.; Coreidae spp.; Pyrrhocoridae spp.; Tinidae spp.; Blostomatidae spp.; Reduviidae spp. and Cimicidae spp.

[0399] Also included are adults and larvae of the order Acari (mites) such as Aceria tosichella Keifer (wheat curl mite); Petrobia latens Müller (brown wheat mite); spider mites and red mites in the family Tetranychidae, Panonychus ulmi Koch (European red mite); Tetranychus urticae Koch (two spotted spider mite); (T. mcdanieli McGregor (McDaniel mite); T. cinnabarinus Boisduval (carmine spider mite); T. turkestani Ugarov & Nikolski (strawberry spider mite); flat mites in the family Tenuipalpidae, Brevipalpus lewisi McGregor (citrus flat mite); rust and bud mites in the family Eriophyidae and other foliar feeding mites and mites important in human and animal health, i.e., dust mites in the family Epidermoptidae, follicle mites in the family Demodicidae, grain mites in the family Glycyphagidae, ticks in the order Ixodidae: Ixodes scapularis Say (deer tick); I. holocyclus Neumann (Australian paralysis tick); Dermacentor variabilis Say (American dog tick); Amblyomma americanum Linnaeus (lone star tick) and scab and itch mites in the families Psoroptidae, Pyemotidae and Sarcoptidae.

[0400] Insect pests of the order Thysanura are of interest, such as Lepisma saccharina Linnaeus (silverfish); Thermobia domestica Packard (firebrat).

[0401] Additional arthropod pests covered include: spiders in the order Araneae such as Loxosceles reclusa Gertsch and Mulaik (brown recluse spider) and the Latrodectus mactans Fabricius (black widow spider) and centipedes in the order Scutigeromorpha such as Scutigera coleoptrata Linnaeus (house centipede).

[0402] Insect pest of interest include the superfamily of stink bugs and other related insects including but not limited to species belonging to the family Pentatomidae (Nezara viridula, Halyomorpha halys, Piezodorus guildini, Euschistus servus, Acrosternum hilare, Euschistus heros, Euschistus tristigmus, Acrosternum hilare, Dichelops furcatus, Dichelops melacanthus, and Bagrada hilaris (Bagrada Bug)), the family Plataspidae (Megacopta cribraria—Bean plataspid) and the family Cydnidae (Scaptocoris castanea—Root stink bug) and Lepidoptera species including but not limited to: diamond-back moth, e.g., Helicoverpa zea Boddie; soybean looper, e.g., Pseudoplusia includens Walker and velvet bean caterpillar e.g., Anticarsia gemmatalis Hübner.

[0403] Methods for measuring pesticidal activity are well known in the art. See, for example, Czapla and Lang, (1990) J. Econ. Entomol. 83:2480-2485; Andrews, et al., (1988) Biochem. J. 252:199-206; Marrone, et al., (1985) J. of Economic Entomology 78:290-293 and U.S. Pat. No. 5,743,477, all of which are herein incorporated by reference in their entirety. Generally, the protein is mixed and used in feeding assays. See, for example Marrone, et al., (1985) J. of Economic Entomology 78:290-293. Such assays can include contacting plants with one or more pests and determining the plant's ability to survive and/or cause the death of the pests.

[0404] Nematodes include parasitic nematodes such as root-knot, cyst and lesion nematodes, including Heterodera spp., Meloidogyne spp. and Globodera spp.; particularly members of the cyst nematodes, including, but not limited to, Heterodera glycines (soybean cyst nematode); Heterodera schachtii (beet cyst nematode); Heterodera avenae (cereal cyst nematode) and Globodera rostochiensis and Globodera pailida (potato cyst nematodes). Lesion nematodes include Pratylenchus spp.

### Seed Treatment

[0405] To protect and to enhance yield production and trait technologies, seed treatment options can provide additional crop plan flexibility and cost effective control against insects, weeds and diseases. Seed material can be treated, typically surface treated, with a composition comprising combinations of chemical or biological herbicides, herbicide safeners, insecticides, fungicides, germination inhibitors and enhancers, nutrients, plant growth regulators and activators, bactericides, nematocides, avicides and/or molluscicides.

[0406] These compounds are typically formulated together with further carriers, surfactants or application-promoting adjuvants customarily employed in the art of formulation. The coatings may be applied by impregnating propagation material with a liquid formulation or by coating with a combined wet or dry formulation. Examples of the various types of compounds that may be used as seed treatments are provided in The Pesticide Manual: A World Compendium, C.D.S. Tomlin Ed., Published by the British Crop Production Council, which is hereby incorporated by reference.

[0407] Some seed treatments that may be used on crop seed include, but are not limited to, one or more of abscisic acid, acibenzolar-S-methyl, avermectin, amitrol, azaconazole, azospirillum, azadirachtin, azoxystrobin, Bacillus spp. (including one or more of cereus, firmus, megaterium, pumilis, sphaericus, subtilis and/or thuringiensis species), bradyrhizobium spp. (including one or more of betae, canariense, elkanii, iriomotense, japonicum, liaonigense, pachyrhizi and/or yuanmingense), captan, carboxin, chitosan, clothianidin, copper, cyazypyr, difenoconazole, etidiazole, fipronil, fludioxonil, fluoxastrobin, fluquinconazole, flurazole, fluxofenim, harpin protein, imazalil, imidacloprid, ipconazole, isoflavenoids, lipo-chitooligosaccharide, mancozeb, manganese, maneb, mefenoxam, metalaxyl, metconazole, myclobutanil, PCNB, penflufen, penicillium, penthiopyrad, permethrine, picoxystrobin, prothioconazole, pyraclostrobin, rynaxypyr, S-metolachlor, saponin, sedaxane, TCMTB, tebuconazole, thiabendazole, thiamethoxam, thiocarb, thiram, tolclofos-methyl, triadimenol, trichoderma, trifloxystrobin, triticonazole and/or zinc. PCNB seed coat refers to EPA Registration Number 00293500419, containing quintozen and terrazole. TCMTB refers to 2-(thiocyanomethylthio) benzothiazole.

[0408] Seed varieties and seeds with specific transgenic traits may be tested to determine which seed treatment options and application rates may complement such varieties and transgenic traits in order to enhance yield. For example, a variety with good yield potential but head smut susceptibility may benefit from the use of a seed treatment that provides protection against head smut, a variety with good yield potential but cyst nematode susceptibility may benefit from the use of a seed treatment that provides protection against cyst nematode, and so on. Likewise, a variety encompassing a transgenic trait conferring insect resistance may benefit from the second mode of action conferred by the seed treatment, a variety encompassing a transgenic trait conferring herbicide resistance may benefit from a seed treatment with a safener that enhances the plants resistance to that herbicide, etc. Further, the good root establishment and early emergence that results from the proper use of a seed treatment may result in more efficient nitrogen use, a better ability to withstand drought and an overall increase in yield potential of a variety or varieties containing a certain trait when combined with a seed treatment.

### Methods for Killing an Insect Pest and Controlling an Insect Population

[0409] In some embodiments methods are provided for killing an insect pest, comprising contacting the insect pest with an insecticidally-effective amount of a recombinant PtIP-83 polypeptide. In some embodiments methods are provided for killing an insect pest, comprising contacting the insect pest with an insecticidally-effective amount of a recombinant pesticidal protein of SEQ ID NO: 1, SEQ ID NO: 3, SEQ ID NO: 5, SEQ ID NO: 7, SEQ ID NO: 9, SEQ ID NO: 11, SEQ ID NO: 13, SEQ ID NO: 15, SEQ ID NO: 17, SEQ ID NO: 19, SEQ ID NO: 21, SEQ ID NO: 23, SEQ ID NO: 716, SEQ ID NO: 754, SEQ ID NO: 755, SEQ ID NO: 756, SEQ ID NO: 757, SEQ ID NO: 758, SEQ ID NO: 759, SEQ ID NO: 760, SEQ ID NO: 761, SEQ ID NO: 762, SEQ ID NO: 763, SEQ ID NO: 764, SEQ ID NO: 765, SEQ ID NO: 766, SEQ ID NO: 767, SEQ ID NO: 768, SEQ ID NO: 769 or a variant thereof.

[0410] In some embodiments methods are provided for killing an insect pest, comprising contacting the insect pest with an insecticidally-effective amount of a recombinant PtIP-83 polypeptide of SEQ ID NO: 236-299, SEQ ID NO: 334-367, SEQ ID NO: 398-427, SEQ ID NO: 518-607, SEQ ID NO: 640-645, and SEQ ID NO: 728-737.

[0411] In some embodiments methods are provided for killing an insect pest, comprising contacting the insect pest with an insecticidally-effective amount of a recombinant PtIP-83 polypeptide comprising an amino acid sequence of any one of SEQ ID NO: 786-888 or a variant thereof.

[0412] In some embodiments methods are provided for controlling an insect pest population, comprising contacting the insect pest population with an insecticidally-effective amount of a recombinant PtIP-83 polypeptide. In some embodiments methods are provided for controlling an insect pest population, comprising contacting the insect pest population with an insecticidally-effective amount of a recombinant PtIP-83 polypeptide of SEQ ID NO: 1, SEQ ID NO: 3, SEQ ID NO: 5, SEQ ID NO: 7, SEQ ID NO: 9, SEQ ID NO: 11, SEQ ID NO: 13, SEQ ID NO: 15, SEQ ID NO: 17, SEQ ID NO: 19, SEQ ID NO: 21, SEQ ID NO: 23, SEQ ID NO: 716, SEQ ID NO: 754, SEQ ID NO: 755, SEQ ID NO: 756, SEQ ID NO: 757, SEQ ID NO: 758, SEQ ID NO: 759, SEQ ID NO: 760, SEQ ID NO: 761, SEQ ID NO: 762, SEQ ID NO: 763, SEQ ID NO: 764, SEQ ID NO: 765, SEQ ID NO: 766, SEQ ID NO: 767, SEQ ID NO: 768, SEQ ID NO: 769 or a variant thereof. As used herein, “controlling a pest population” or “controls a pest” refers to any effect on a pest that results in limiting the damage that the pest causes. Controlling a pest includes, but is not limited to, killing the pest, inhibiting development of the pest, altering fertility or growth of the pest in such a manner that the pest provides less damage to the plant, decreasing the number of offspring produced, producing less fit pests, producing pests more susceptible to predator attack or deterring the pests from eating the plant.

[0413] In some embodiments methods are provided for controlling an insect pest population, comprising contacting the insect pest population with an insecticidally-effective amount of a recombinant PtIP-83 polypeptide of any one of SEQ ID NO: 236-299, SEQ ID NO: 334-367, SEQ ID NO: 398-427, SEQ ID NO: 518-607, SEQ ID NO: 640-645, and SEQ ID NO: 728-737.

[0414] In some embodiments methods are provided for controlling an insect pest population, comprising contacting the insect pest population with an insecticidally-effective amount of a recombinant PtIP-83 polypeptide of any one of SEQ ID NO: 786-888 or a variant thereof.

[0415] In some embodiments methods are provided for protecting a plant from an insect pest, comprising expressing in the plant or cell thereof at least one recombinant polynucleotide encoding a PtIP-83 polypeptide. In some embodiments methods are provided for protecting a plant from an insect pest, comprising expressing in the plant or cell thereof a recombinant polynucleotide encoding a PtIP-83 polypeptide of SEQ ID NO: 1, SEQ ID NO: 3, SEQ ID NO: 5, SEQ ID NO: 7, SEQ ID NO: 9, SEQ ID NO: 11, SEQ ID NO: 13, SEQ ID NO: 15, SEQ ID NO: 17, SEQ ID NO: 19, SEQ ID NO: 21, SEQ ID NO: 23, SEQ ID NO: 716, SEQ ID NO: 754, SEQ ID NO: 755, SEQ ID NO: 756, SEQ ID NO: 757, SEQ ID NO: 758, SEQ ID NO: 759, SEQ ID NO: 760, SEQ ID NO: 761, SEQ ID NO: 762, SEQ ID NO: 763, SEQ ID NO: 764, SEQ ID NO: 765, SEQ ID NO: 766, SEQ ID NO: 767, SEQ ID NO: 768 or SEQ ID NO: 769 or variants thereof.

[0416] In some embodiments methods are provided for protecting a plant from an insect pest, comprising expressing in the plant or cell thereof at least one recombinant polynucleotide encoding a PtIP-83 polypeptide. In some embodiments methods are provided for protecting a plant from an insect pest, comprising expressing in the plant or cell thereof a recombinant polynucleotide encoding a PtIP-83 polypeptide of any one of SEQ ID NO: 236-299, SEQ ID NO: 334-367, SEQ ID NO: 398-427, SEQ ID NO: 518-607, SEQ ID NO: 640-645, and SEQ ID NO: 728-737.

[0417] In some embodiments methods are provided for protecting a plant from an insect pest, comprising expressing in the plant or cell thereof at least one recombinant polynucleotide encoding a PtIP-83 polypeptide. In some embodiments methods are provided for protecting a plant from an insect pest, comprising expressing in the plant or cell thereof a recombinant polynucleotide encoding a PtIP-83 polypeptide of any one of SEQ ID NO: 786-888 or a variant thereof.

### Insect Resistance Management (IRM) Strategies

[0418] Expression of B. thuringiensis 5-endotoxins in transgenic corn plants has proven to be an effective means of controlling agriculturally important insect pests (Perlak, et al., 1990; 1993). However, insects have evolved that are resistant to B. thuringiensis δ-endotoxins expressed in transgenic plants. Such resistance, should it become widespread, would clearly limit the commercial value of germplasm containing genes encoding such B. thuringiensis δ-endotoxins.

[0419] One way to increasing the duration of effectiveness of the transgenic insecticides against target pests and contemporaneously reducing the development of insecticide-resistant pests is to provide non-transgenic (i.e., non-insecticidal protein expressing) refuge crop plants (a section of non-insecticidal crops/corn) for use with transgenic crops producing a single insecticidal protein active against target pests. The United States Environmental Protection Agency (epa.gov/oppbppdl/biopesticides/pips/bt_corn_refuge_2006.htm, which can be accessed using the www prefix) publishes the requirements for use with transgenic crops producing a single Bt protein active against target pests. In addition, the National Corn Growers Association, on their website: (ncga.com/insect-resistance-management-fact-sheet-bt-corn, which can be accessed using the www prefix) also provides similar guidance regarding refuge requirements. Economic factors constrain this approach as losses to insects within the refuge area, larger refuges may reduce overall yield.

[0420] Another way of increasing the duration of effectiveness of the transgenic insecticides against target pests and contemporaneously reducing the development of insecticide-resistant pests would be to have a repository of insecticidal genes that are effective against groups of insect pests and which manifest their effects through different modes of action where each gene could be deployed against a fixed number of generations of insects before another gene is deployed.

[0421] Expression in a plant of two or more insecticidal compositions toxic to the same insect species, each insecticide being expressed at efficacious levels would be another way to achieve control of the development of resistance. This is based on the principle that evolution of resistance against two separate modes of action is far more unlikely than only one. Roush, for example, outlines two-toxin strategies, also called “pyramiding” or “stacking,” for management of insecticidal transgenic crops. (The Royal Society. Phil. Trans. R. Soc. Lond. B. (1998) 353:1777-1786). Stacking or pyramiding of two different proteins each effective against the target pests and with little or no cross-resistance can allow for use of a smaller refuge. The US Environmental Protection Agency requires significantly less (generally 5%) structured refuge of non-Bt corn be planted than for single trait products (generally 20%). There are various ways of providing the IRM effects of a refuge, including various geometric planting patterns in the fields and in-bag seed mixtures, as discussed further by Roush.

[0422] Bacillus thuringiensis Cry family toxins generally show a two-phase mechanism action starting with proteolytic activation in the insect midgut and then specific binding to midgut intestinal cells followed by cytolytic pore formation (Griffitts and Aroian, BioEssays, 2005). This second step includes both the site of action (the site at which the toxin binds, and the mode of action, the pore formation. Generally, Bt Cry toxins may show different sites of action, but all show the same mode of action via pore formation. One mechanism employed to delay resistance of insects from one toxin to another includes stacking two different Bt Cry toxins with the same mode of action, but different sites of action, as determined by heterologous competitive binding assays (See Ferre and Van Rie, Annu. Rev. Entomol. 2002).

[0423] In some embodiments the PtIP-83 polypeptide of the disclosure are useful as an insect resistance management strategy in combination (i.e., pyramided) with other pesticidal proteins include but are not limited to Bt toxins, Xenorhabdus sp. or Photorhabdus sp. insecticidal proteins, and the like.

[0424] Provided are methods of controlling Lepidoptera and/or Coleoptera insect infestation(s) in a transgenic plant that promote insect resistance management, comprising expressing in the plant at least two different insecticidal proteins having different modes of action.

[0425] In some embodiments the methods of controlling Lepidoptera and/or Coleoptera insect infestation in a transgenic plant and promoting insect resistance management the at least one of the insecticidal proteins comprise a PtIP-83 polypeptide insecticidal to insects in the order Lepidoptera and/or Coleoptera.

[0426] In some embodiments the methods of controlling Lepidoptera and/or Coleoptera insect infestation in a transgenic plant and promoting insect resistance management the at least one of the insecticidal proteins comprises a PtIP-83 polypeptide of SEQ ID NO: 1, SEQ ID NO: 3, SEQ ID NO: 5, SEQ ID NO: 7, SEQ ID NO: 9, SEQ ID NO: 11, SEQ ID NO: 13, SEQ ID NO: 15, SEQ ID NO: 17, SEQ ID NO: 19, SEQ ID NO: 21, SEQ ID NO: 23, SEQ ID NO: 716, SEQ ID NO: 754, SEQ ID NO: 755, SEQ ID NO: 756, SEQ ID NO: 757, SEQ ID NO: 758, SEQ ID NO: 759, SEQ ID NO: 760, SEQ ID NO: 761, SEQ ID NO: 762, SEQ ID NO: 763, SEQ ID NO: 764, SEQ ID NO: 765, SEQ ID NO: 766, SEQ ID NO: 767, SEQ ID NO: 768, SEQ ID NO: 769 or variants thereof, insecticidal to insects in the order Lepidoptera and/or Coleoptera.

[0427] In some embodiments the methods of controlling Lepidoptera and/or Coleoptera insect infestation in a transgenic plant and promoting insect resistance management the at least one of the insecticidal proteins comprises a PtIP-83 polypeptide of any one of SEQ ID NO: 236-299, SEQ ID NO: 334-367, SEQ ID NO: 398-427, SEQ ID NO: 518-607, SEQ ID NO: 640-645, and SEQ ID NO: 728-737.

[0428] In some embodiments the methods of controlling Lepidoptera and/or Coleoptera insect infestation in a transgenic plant and promoting insect resistance management comprise expressing in the transgenic plant a PtIP-83 polypeptide and a Cry protein insecticidal to insects in the order Lepidoptera and/or Coleoptera having different modes of action.

[0429] In some embodiments the methods of controlling Lepidoptera and/or Coleoptera insect infestation of a transgenic plant and promoting insect resistance management comprise in the transgenic plant a PtIP-83 polypeptide of SEQ ID NO: 1, SEQ ID NO: 3, SEQ ID NO: 5, SEQ ID NO: 7, SEQ ID NO: 9, SEQ ID NO: 11, SEQ ID NO: 13, SEQ ID NO: 15, SEQ ID NO: 17, SEQ ID NO: 19, SEQ ID NO: 21, SEQ ID NO: 23, SEQ ID NO: 716, SEQ ID NO: 754, SEQ ID NO: 755, SEQ ID NO: 756, SEQ ID NO: 757, SEQ ID NO: 758, SEQ ID NO: 759, SEQ ID NO: 760, SEQ ID NO: 761, SEQ ID NO: 762, SEQ ID NO: 763, SEQ ID NO: 764, SEQ ID NO: 765, SEQ ID NO: 766, SEQ ID NO: 767, SEQ ID NO: 768, SEQ ID NO: 769 or variants thereof and a Cry protein insecticidal to insects in the order Lepidoptera and/or Coleoptera having different modes of action.

[0430] Also provided are methods of reducing likelihood of emergence of Lepidoptera and/or Coleoptera insect resistance to transgenic plants expressing in the plants insecticidal proteins to control the insect species, comprising expression of a PtIP-83 polypeptide insecticidal to the insect species in combination with a second insecticidal protein to the insect species having different modes of action.

[0431] Also provided are means for effective Lepidoptera and/or Coleoptera insect resistance management of transgenic plants, comprising co-expressing at high levels in the plants two or more insecticidal proteins toxic to Lepidoptera and/or Coleoptera insects but each exhibiting a different mode of effectuating its killing activity, wherein the two or more insecticidal proteins comprise a PtIP-83 polypeptide and a Cry protein. Also provided are means for effective Lepidoptera and/or Coleoptera insect resistance management of transgenic plants, comprising co-expressing at high levels in the plants two or more insecticidal proteins toxic to Lepidoptera and/or Coleoptera insects but each exhibiting a different mode of effectuating its killing activity, wherein the two or more insecticidal proteins comprise a PtIP-83 polypeptide of SEQ ID NO: 1, SEQ ID NO: 3, SEQ ID NO: 5, SEQ ID NO: 7, SEQ ID NO: 9, SEQ ID NO: 11, SEQ ID NO: 13, SEQ ID NO: 15, SEQ ID NO: 17, SEQ ID NO: 19, SEQ ID NO: 21, SEQ ID NO: 23, SEQ ID NO: 716, SEQ ID NO: 754, SEQ ID NO: 755, SEQ ID NO: 756, SEQ ID NO: 757, SEQ ID NO: 758, SEQ ID NO: 759, SEQ ID NO: 760, SEQ ID NO: 761, SEQ ID NO: 762, SEQ ID NO: 763, SEQ ID NO: 764, SEQ ID NO: 765, SEQ ID NO: 766, SEQ ID NO: 767, SEQ ID NO: 768, SEQ ID NO: 769 or variants thereof and a Cry protein.

[0432] In addition, methods are provided for obtaining regulatory approval for planting or commercialization of plants expressing proteins insecticidal to insects in the order Lepidoptera and/or Coleoptera, comprising the step of referring to, submitting or relying on insect assay binding data showing that the PtIP-83 polypeptide does not compete with binding sites for Cry proteins in such insects. In addition, methods are provided for obtaining regulatory approval for planting or commercialization of plants expressing proteins insecticidal to insects in the order Lepidoptera and/or Coleoptera, comprising the step of referring to, submitting or relying on insect assay binding data showing that the PtIP-83 polypeptide of SEQ ID NO: 1, SEQ ID NO: 3, SEQ ID NO: 5, SEQ ID NO: 7, SEQ ID NO: 9, SEQ ID NO: 11, SEQ ID NO: 13, SEQ ID NO: 15, SEQ ID NO: 17, SEQ ID NO: 19, SEQ ID NO: 21, SEQ ID NO: 23, SEQ ID NO: 716, SEQ ID NO: 754, SEQ ID NO: 755, SEQ ID NO: 756, SEQ ID NO: 757, SEQ ID NO: 758, SEQ ID NO: 759, SEQ ID NO: 760, SEQ ID NO: 761, SEQ ID NO: 762, SEQ ID NO: 763, SEQ ID NO: 764, SEQ ID NO: 765, SEQ ID NO: 766, SEQ ID NO: 767, SEQ ID NO: 768, SEQ ID NO: 769 or variant thereof does not compete with binding sites for Cry proteins in such insects.

### Methods for Increasing Plant Yield

[0433] Methods for increasing plant yield are provided. The methods comprise providing a plant or plant cell expressing a polynucleotide encoding the pesticidal polypeptide sequence disclosed herein and growing the plant or a seed thereof in a field infested with a pest against which the polypeptide has pesticidal activity. In some embodiments, the polypeptide has pesticidal activity against a Lepidopteran, Coleopteran, Dipteran, Hemipteran or nematode pest, and the field is infested with a Lepidopteran, Hemipteran, Coleopteran, Dipteran or nematode pest.

[0434] As defined herein, the “yield” of the plant refers to the quality and/or quantity of biomass produced by the plant. “Biomass” as used herein refers to any measured plant product. An increase in biomass production is any improvement in the yield of the measured plant product. Increasing plant yield has several commercial applications. For example, increasing plant leaf biomass may increase the yield of leafy vegetables for human or animal consumption. Additionally, increasing leaf biomass can be used to increase production of plant-derived pharmaceutical or industrial products. An increase in yield can comprise any statistically significant increase including, but not limited to, at least a 1% increase, at least a 3% increase, at least a 5% increase, at least a 10% increase, at least a 20% increase, at least a 30%, at least a 50%, at least a 70%, at least a 100% or a greater increase in yield compared to a plant not expressing the pesticidal sequence.

[0435] In specific methods, plant yield is increased as a result of improved pest resistance of a plant expressing a PtIP-83 polypeptide disclosed herein. Expression of the PtIP-83 polypeptide results in a reduced ability of a pest to infest or feed on the plant, thus improving plant yield.

### Methods of Processing

[0436] Further provided are methods of processing a plant, plant part or seed to obtain a food or feed product from a plant, plant part or seed comprising a PtIP-83 polypeptide. The plants, plant parts or seeds provided herein, can be processed to yield oil, protein products and/or by-products that are derivatives obtained by processing that have commercial value. Non-limiting examples include transgenic seeds comprising a nucleic acid molecule encoding a PtIP-83 polypeptide which can be processed to yield soy oil, soy products and/or soy by-products.

[0437] “Processing” refers to any physical and chemical methods used to obtain any soy product and includes, but is not limited to, heat conditioning, flaking and grinding, extrusion, solvent extraction or aqueous soaking and extraction of whole or partial seeds

[0438] The following examples are offered by way of illustration and not by way of limitation.

### EXPERIMENTALS

### Example 1—Identification of an Insecticidal Protein Active Against Broad Spectrum of Lepidopteran Insects from the Fern, Adiantum pedatum, (PS-7140)

[0439] The insecticidal protein PtIP-83Aa (SEQ ID NO: 1) was identified by protein purification, mass spectroscopy (MS) and PCR cloning from Adiantum pedatum, (PS-7140) as follows.

[0440] Adiantum pedatum was collected by a collaborator and assigned identification number PS-7140. PS-7140 was collected, flash frozen in liquid N₂ and stored at −80° C. After storage it was ground to a fine powder at liquid N₂ temperatures with a Geno Ball Mill (SPEX, Metuchen, NJ). To extract protein, 20 mL of 50 mM Tris buffer, pH 8.0, 150 mM KCl, 2.5 mM EDTA, 1.5% polyvinylpolypyrrolidone (PVPP) and protease inhibitor cocktail (Roche Diagnostics, Germany) was added to every 5 g fresh weight of tissue. The homogenate was centrifuged to remove cell debris, filtered through 0.22 um filters and desalted using 10 ml Zeba Spin Desalting columns (Thermo Scientific, IL.)

[0441] Bioassays against the three pest species, Soybean Looper (SBL) (Chrysodeixis includens), Corn Earworm (CEW) (Helicoverpa zea) and European Corn Borer (ECB) (Ostrinia nubilalis) were conducted using the desalted protein extract overlaid onto an agar-based Lepidoptera diet (Southland Products Inc., Lake Village, AR) in a 96-well plate format. Six replicates were used per sample. Samples were allowed to dry on top of the diet and two to five neonate insects were placed into each well of the treated plate. After four days of incubation at 27° C. larvae were scored for mortality or severity of stunting. The scores were recorded numerically as dead (3), severely stunted (2) (little or no growth but alive and equivalent to a 1^{st} instar larvae), stunted (1) (growth to second instar but not equivalent to controls), or normal (0). Subjecting the sample to proteinase K and heat treatments resulted in loss of activity indicating that the active principle was proteinaceous in nature. Bioassay results are shown in Table 6.

TABLE 6

| | Activity of A. pedatum crude protein | | |
|---|---|---|---|
| | extract against Lepidoptera larvae | | |
| | | | Ave. Score after Proteinase |
| | | Ave. Score | K/Heat |
| Neonate | Soybean Looper | 3 | 0 |
| | Corn Earworm | 2 | 0 |
| | European Corn Borer | 1.5 | 0 |

[0442] For protein purification, PS-7140 fronds were ground to a fine powder at liquid N₂ temperatures with a Geno Ball Mill (SPEX, Metuchen, NJ). Protein was extracted in 100 mM Tris buffer, pH 8.0, 150 mM KCl, 2.5 mM EDTA, 1.5% PVPP and protease inhibitor cocktail (Roche Diagnostics, Germany). The extracted material was centrifuged to remove cell debris, filtered through Miracloth™ (Calbiochem) and then ammonium sulfate added to 35% and allowed to equilibrate. The suspension was centrifuged and the resulting pellet was resuspended in a small volume of 20 mM Tris buffer, pH 8. After clarification by centrifugation it was desalted using a Sephadex G25 column (GE, Piscataway, NJ) equilibrated in 20 mM Tris buffer, pH 8. The desalted protein fraction pool was loaded onto a 1 ml Mono Q column (GE, Piscataway, N.J.) and eluted with a linear (60 CV (column volumes) gradient from 0 M to 0.7 M NaCl in 20 mM Tris, pH 8.0. Fractions active against SBL and ECB were combined and desalted into 25 mM MOPS, pH 6.7. This was then loaded onto a 4 mL Mono P column (Buffer A: 25 mM MOPS, pH 6.7; Buffer B: Polybuffer 74, pH 4) using a 4 CV linear gradient (0% Buffer B) followed by a 15 CV 100% Buffer B wash. 1 mL fractions were collected. Fractions 47 and 48 showed activity against ECB and SBL. Based on LDS-PAGE these active fractions contained a protein band at approximately 95 kDa. The protein representing the 95 kDa band was named PtIP-83Aa (SEQ ID NO: 1).

[0443] Protein identification was performed by MS analysis after protein digestion with trypsin. Proteins for MS identification were obtained after running the sample on an LDS-PAGE gel stained with Brilliant Blue G-250 Stain. Bands of interest were excised from the gel, de-stained, reduced with dithiothreitol and then alkylated with iodoacetamide. Following overnight digestion with trypsin, samples were analyzed by nano-liquid chromatography/electrospray tandem mass spectrometry (nano-LC/ES-MSMS) on a Thermo Q Exactive Orbitrap mass spectrometer (Thermo Fisher Scientific) interfaced with an Eksigent NanoLC Ultra 1-D Plus nano-Ic system and a nanolc-as2 autosampler (AB Sciex). The protein identification was performed by searching the nano-LC/MSMS data against an in-house transcriptome database containing the transcripts from the source plant materials and the public protein database Swiss-Prot using the Mascot search engine (Matrix Science).

[0444] The amino acid sequence of SEQ ID NO: 1 was BLAST (Basic Local Alignment Search Tool; Altschul, et al., (1993) J. Mol. Biol. 215:403-410; see also ncbi.nlm.nih.gov/BLAST/, which can be accessed using the www prefix) searched against public and DUPONT-PIONEER internal databases that included plant protein sequences. Amino acid sequences were aligned with proteins in a proprietary DUPONT-PIONEER plant protein database.

### Example 2 Transcriptomic Sequencing of PtIP-83Aa

[0445] A transcriptome for Adiantum pedatum, PS-7140 was prepared as follows. Total RNAs were isolated from frozen tissues by use of the Qiagen® RNeasy® kit for total RNA isolation. Sequencing libraries from the resulting total RNAs were prepared using the TruSeq™ mRNA-Seq kit and protocol from Illumina®, Inc. (San Diego, CA). Briefly, mRNAs were isolated via attachment to oligo(dT) beads, fragmented to a mean size of 180 nt, reverse transcribed into cDNA by random hexamer prime, end repaired, 3′ A-tailed, and ligated with Illumina® indexed TruSeq™ adapters. Ligated cDNA fragments were PCR amplified using Illumina® TruSeq™ primers and purified PCR products were checked for quality and quantity on the Agilent Bioanalyzer® DNA 7500 chip. Post quality and quantity assessment, 100 ng of the transcript library was normalized by treatment with Duplex Specific Nuclease (DSN) (Evrogen®, Moscow, Russia). Normalization was accomplished by addition of 200 mM Hepes buffer, followed by heat denaturation and five hour anneal at 68° C. Annealed library was treated with 2 ul of DSN enzyme for 25 minutes, purified by Qiagen® MinElute® columns according to manufacturer protocols, and amplified twelve cycles using Illumina® adapter specific primers. Final products were purified with Ampure® XP beads (Beckman Genomics, Danvers, MA) and checked for quality and quantity on the Agilent Bioanalyzer® DNA 7500 chip.

[0446] Normalized transcript libraries were sequenced according to manufacturer protocols on the Illumina® Genome Analyzer IIx. Each library was hybridized to two flow cell lanes and amplified, blocked, linearized and primer hybridized using the Illumina clonal cluster generation process on cBot®. Sequencing was completed on the Genome Analyzer IIx, generating sixty million 75 bp paired end reads per normalized library.

[0447] Peptide sequence identified for PtIP-83Aa (SEQ ID NO: 1) by LC-MS/MS/MS sequencing (described in Example 1) were searched against the protein sequences predicted by open reading frames (ORFs) from the internal transcriptome for PS-7140CF assemblies. The peptides gave a perfect match to a transcript corresponding to PtIP-83Aa (SEQ ID NO: 2). The coding sequences were used to design the following primers to clone the PtIP-83Aa coding sequence:

(SEQ ID NO: 30)
CCATGGCTCTCGTGGATTACGGCAAG (95 KD N-T Nco I for)
and
(SEQ ID NO: 31)
GTTAACCTACTCTTCGTCGTGCCGCCAGTC (95 KD C-T Hpa I REV)

This clone was produced by polymerase chain reaction using the KOD Hot Start DNA polymerase® PCR kit (Novagen, Merck KGaA, Darmstadt, Germany) and the total RNA from Adiantum pedatum as a template. The cloned PCR product was confirmed by sequencing.

[0448] Based on the DNA and protein sequencing, the PtIP-83Aa polynucleotide sequence is shown as SEQ ID NO: 2 and the polypeptide sequence as SEQ ID NO: 1.

### Example 3—Identification of PtIP-83 Homologs

[0449] Gene identities may be determined by conducting BLAST® (Basic Local Alignment Search Tool; Altschul, et al., (1993) J. Mol. Biol. 215:403-410; see also ncbi.nlm.nih.gov/BLAST/, which can be accessed using the www prefix) searches under default parameters for similarity to sequences. The polynucleotide sequence for PtIP-83Aa (SEQ ID NO: 2) was analyzed. No close homologs of PtIP-83Aa (SEQ ID NO: 1) were identified in public databases.

[0450] Gene identities conducted by BLAST® in a DUPONT PIONEER internal transcriptome database of ferns and other primitive plants identified homologs for PtIP-83Aa (SEQ ID NO: 1). The PtIP-83Aa homologs and the organism they were identified from are shown in Table 7.

TABLE 7

| | Sequence id no | Source | Organism |
|---|---|---|---|
| PtIP-83Aa | SEQ ID NO: 1 | PS-7140 | Adiantum pedatum |
| PtIP-83Ca | SEQ ID NO: 5 | PS-11481 | Adiantum trapeziforme var. |
| | | | braziliense |
| PtIP-83Cb | SEQ ID NO: 7 | PS-11481 | Adiantum trapeziforme var. |
| | | | braziliense |
| PtIP-83Cc | SEQ ID NO: 9 | PS-11481 | Adiantum trapeziforme var. |
| | | | braziliense |
| PtIP-83Cd | SEQ ID NO: 11 | PS-11481 | Adiantum trapeziforme var. |
| | | | braziliense |
| PtIP-83Ce | SEQ ID NO: 13 | PS-12345 | Adiantum peruvianum |
| PtIP-83Cf | SEQ ID NO: 15 | PS-9224 | Lygodium flexuosum |
| PtIP-83Cg | SEQ ID NO: 17 | PS-12345 | Adiantum peruvianum |
| PtIP-83Da | SEQ ID NO: 19 | PS-12345 | Adiantum peruvianum |
| PtIP-83Ea | SEQ ID NO: 21 | PS-11481 | Adiantum trapeziforme var. |
| | | | braziliense |
| PtIP-83Eb | SEQ ID NO: 23 | PS-11481 | Adiantum trapeziforme var. |
| | | | braziliense |
| PtIP-83Fa | SEQ ID NO: 3 | PS-8568 | Microsorum musifolium |
| PtIP-83Fb | SEQ ID NO: 716 | PS-9319 | Polypodium punctatum |
| | | | ‘Serratum’ |
| PtIP-83Ch | SEQ ID NO: 754 | LW13327 | Polystichium tsus-simense |
| PtIP-83Ch- | SEQ ID NO: 755 | LW13327 | Polystichium tsus-simense |
| like | | | |
| PtIP-83Fd | SEQ ID NO: 756 | LW13327 | Polystichium tsus-simense |
| PtIP-83Fe | SEQ ID NO: 757 | LW13327 | Polystichium tsus-simense |
| PtIP-83Ci | SEQ ID NO: 758 | LW12354 | Rumohra adiantiformis |
| PtIP-83Ci- | SEQ ID NO: 759 | LW12354 | Rumohra adiantiformis |
| like | | | |
| PtIP-83Ff | SEQ ID NO: 760 | LW12354 | Rumohra adiantiformis |
| PtIP-83Ff- | SEQ ID NO: 761 | LW12354 | Rumohra adiantiformis |
| like | | | |
| PtIP-83Cj | SEQ ID NO: 762 | NY012 | Asplenium trichomanes |
| PtIP-83Cj- | SEQ ID NO: 763 | NY012 | Asplenium trichomanes |
| like | | | |
| PtIP-83Ga | SEQ ID NO: 764 | NY009 | Phyllitis scolopendium |
| | | | ‘Angustifolia’ |
| PtIP-83Ga- | SEQ ID NO: 765 | NY009 | Phyllitis scolopendium |
| like | | | ‘Angustifolia’ |
| PtIP-83Fg | SEQ ID NO: 766 | NY009 | Phyllitis scolopendium |
| | | | ‘Angustifolia’ |
| PtIP-83Fh | SEQ ID NO: 767 | NY009 | Phyllitis scolopendium |
| | | | ‘Angustifolia’ |
| PtIP-83Fi | SEQ ID NO: 768 | NY009 | Phyllitis scolopendium |
| | | | ‘Angustifolia’ |
| PtIP-83Fi- | SEQ ID NO: 769 | NY009 | Phyllitis scolopendium |
| like | | | ‘Angustifolia’ |

[0451] cDNA was generated from source organisms with identified homologs by reverse transcription from total RNA. Homologs were PCR amplified from their respective cDNAs using primers designed to the coding sequences of each homolog and subcloned into a plant transient vector containing the DMMV promoter. Cloned PCR products were confirmed by sequencing. Cloning primers are shown in Table 8. The cDNA for homolog PtIP-83Fb was synthesized (SEQ ID NO: 717) based on the transcriptome assembly of PS-9319 and subcloned into a plant transient vector.

TABLE 8

| Gene | Primer | Sequence |
|---|---|---|
| PtIP-83Cb | GZ-550- | CGAAATCTCTCATCTAAGAGGCTGGATCCTAGGATGGATTACAGCACG |
| | 83Ca-F | CTTTACAGGGAC (SEQ ID NO: 608) |
| PtIP-83Cb | GZ-550- | TTAAGTTGGCCAATCCAGAAGATGGACAAGTCTAGACTACTCCTCCTCT |
| | 83Ca-R | TGCCGCCAGTC (SEQ ID NO: 609) |
| PtIP-83Ca, Cc, | GZ-550- | CGAAATCTCTCATCTAAGAGGCTGGATCCTAGGATGGATTACAGCACG |
| and Cd | 83Ca-F | CTTTACAGGGAC (SEQ ID NO: 608) |
| PtIP-83Ca, Cc, | 83Ca-1s-R | CAA GGA TTG CAT TGC TAG GAA GG (SEQ ID NO: 611) |
| and Cd | | |
| PtIP-83Ca, Cc, | GZ-550- | TTAAGTTGGCCAATCCAGAAGATGGACAAGTCTAGACTACTCCTCCTCT |
| and Cd | 83Ca-R | TGCCGCCAGTC (SEQ ID NO: 609) |
| PtIP-83Ca, Cc, | 83Ca-1s | CCTTCCTAGCAATGCAATCCTTG (SEQ ID NO: 613) |
| and Cd | | |
| PtIP-83Ce | GZ-550- | CGAAATCTCTCATCTAAGAGGCTGGATCCTAGGATGGATTACAGCACG |
| | 83Ca-F | CTTTACAGGGAC (SEQ ID NO: 608) |
| PtIP-83Ce | 550- | AAGTTGGCCAATCCAGAAGATGGACAAGTCTAGACTACTCCTCCTCTTT |
| | 12345-R | CTCCTCCTGCC (SEQ ID NO: 615) |
| PtIP-83Cf | 550-9224- | CGAAATCTCTCATCTAAGAGGCTGGATCCTAGGATGGCCAGTGTACTG |
| | F1 | GATTACAGCAC (SEQ ID NO: 616) |
| PtIP-83Cf | 550-9224- | TTAAGTTGGCCAATCCAGAAGATGGACAAGTCTAGACTACTCCTCCTCG |
| | R1 | TGCCGCC (SEQ ID NO: 617) |
| PtIP-83Cg | 550- | GAAATCTCTCATCTAAGAGGCTGGATCCTAGGATGGATTACAGCACTC |
| | 11790.2-F | TTTACAGGGATC (SEQ ID NO: 618) |
| PtIP-83Cg | GZ-550- | TTAAGTTGGCCAATCCAGAAGATGGACAAGTCTAGACTACTCCTCCTCT |
| | 83Ca-R | TGCCGCCAGTC (SEQ ID NO: 609) |
| PtIP-83Da | GZ-550- | CGAAATCTCTCATCTAAGAGGCTGGATCCTAGGATGGATTACAGCACG |
| | 83Ca-F | CTTTACAGGGAC (SEQ ID NO: 608) |
| PtIP-83Da | 550- | GTTGGCCAATCCAGAAGATGGACAAGTCTAGATTAGAGTGGCTTCGCC |
| | UTR8.7-R | AGTGTCG (SEQ ID NO: 621) |
| PtIP-83Ea | GZ-550- | CGAAATCTCTCATCTAAGAGGCTGGATCCTAGGATGGATTACAGCACG |
| | 83Ca-F | CTTTACAGGGAC (SEQ ID NO: 608) |
| PtIP-83Ea | 550- | AAGTTGGCCAATCCAGAAGATGGACAAGTCTAGACTACTCCTCCTCTTT |
| | 12345-R | CTCCTCCTGCC (SEQ ID NO: 615) |
| PtIP-83Eb | GZ-550- | CGAAATCTCTCATCTAAGAGGCTGGATCCTAGGATGGATTACAGCACG |
| | 83Ca-F | CTTTACAGGGAC (SEQ ID NO: 608) |
| PtIP-83Eb | 550- | AAGTTGGCCAATCCAGAAGATGGACAAGTCTAGACTACTCCTCCTCTTT |
| | 12345-R | CTCCTCCTGCC (SEQ ID NO: 615) |
| PtIP-83Fa | infusion | TTTAACTTAGCCTAGGATCCATGGAATATAGCAGCTTGTAC |
| | bamHI | (SEQ ID NO: 32) |
| PtIP-83Fa | infusion | ACTCCTTCTTTAGTTAACTTACTCCACATCACCCTCTTGTCG |
| | HpaI | (SEQ ID NO: 33) |
| PtIP-83Ch and | LW13327- | cgaaatctctcatctaagaggctggatcctaggATGGATTACAGCACGC |
| PtIP-83Ch-like | F1 | TTTACAGG (SEQ ID NO: 770) |
| PtIP-83Ch and | LW13327- | taagttggccaatccagaagatggacaagtctagaCTACTCCTCCACCT |
| PtIP-83Ch-like | R1 | CCTGCCTCC (SEQ ID NO: 771) |
| PtIP-83Fd and | LW13327- | cgaaatctctcatctaagaggctggatcctaggATGACGATGGCGGCAA |
| PtIP-83Fe | F2 | CTG (SEQ ID NO: 772) |
| PtIP-83Fd and | LW13327- | ggccaatccagaagatggacaagtctagaCTAGAAAGAAATTTTCCTGA |
| PtIP-83Fe | R2 | TAGCTGAG (SEQ ID NO: 773) |
| PtIP-83Ci and | LW12354- | cgaaatctctcatctaagaggctggatcctaggATGGATTACAGCACTC |
| PtIP-83Ci-like | F1 | TTTACACGG (SEQ ID NO: 774) |
| PtIP-83Ci and | LW12354- | taagttggccaatccagaagatggacaagtctagaCTACTCCTCTTGCC |
| PtIP-83Ci-like | R1 | GCCAGTC (SEQ ID NO: 775) |
| PtIP-83Ff and | LW12354- | cgaaatctctcatctaagaggctggatcctaggATGGCTGCCTCCGCTG |
| PtIP-83Ff-like | F2 | CTG (SEQ ID NO: 776) |
| PtIP-83Ff and | LW12354- | taagttggccaatccagaagatggacaagtctagaCTAGAAAGAAATGC |
| PtIP-83Ff-like | R2 | GCCGGATAG (SEQ ID NO: 777) |
| PtIP-83Cj and | NY012-F1 | cgaaatctctcatctaagaggctggatcctaggATGGATTACAGCACGC |
| PtIP-83Cj-like | | TTTACAGG (SEQ ID NO: 778) |
| PtIP-83Cj and | NY012-R1 | taagttggccaatccagaagatggacaagtctagaCTACTCCTCCTCCT |
| PtIP-83Cj-like | | CCTCGTGCC (SEQ ID NO: 779) |
| PtIP-83Ga and | NY009-F1 | cgaaatctctcatctaagaggctggatcctaggATGGGTGTCACAGTCG |
| PtIP-83Ga-like | | TTAGCG (SEQ ID NO: 780) |
| PtIP-83Ga and | NY009-R1 | taagttggccaatccagaagatggacaagtctagaTTAGCTGACGACCT |
| PtIP-83Ga-like | | GATCATCGC (SEQ ID NO: 781) |
| PtIP-83Fg, Fi, | NY009-F2 | cgaaatctctcatctaagaggctggatcctaggATGGAGTATGGCAGCT |
| and Fi-like | | TGTATGG (SEQ ID NO: 782) |
| PtIP-83Fg, Fi, | NY009- | gttggccaatccagaagatggacaagtctagaCTATAACTCCGCATCAG |
| and Fi-like | R2a | CTCGTTG (SEQ ID NO: 783) |
| PtIP-83Fh | NY009-F3 | cgaaatctctcatctaagaggctggatcctaggATGGAGTACTCCGACT |
| | | TGTATGAGG (SEQ ID NO: 784) |
| PtIP-83Fh | NY009-R3 | taagttggccaatccagaagatggacaagtctagaTCACTCCTCATCGA |
| | | CTTCCCG (SEQ ID NO: 785) |

[0452] Additional diversity was recovered by PCR amplification with primers designed to the non-coding regions flanking identified homologs. Primers were designed to conserved sequences in the 5′ and 3′ untranslated regions of PtIP-83Ca BLAST hits within the DUPONT PIONEER internal transcriptome database. Primers pairs (1) GCCTTTATCGACTCCTAATTCACACC (SEQ ID NO: 626) and CCACATTGTGCATTACGACCAC (SEQ ID NO: 627), and (2) CCAGTGATTTGAGTTCCTTCATTATG (SEQ ID NO: 628) and GAACAGTACATTGACTGCATGTGC (SEQ ID NO: 629) were used to generate PCR products from PS-11481 and PS-12345 cDNA. Resulting PCR products were blunt end cloned using the Zero Blunt® TOPO® PCR Cloning Kit (Invitrogen) and sequence analyzed. From this analysis, homologs PtIP-83Cg, Da, Ea, and Eb were identified and subcloned into the plant transient vector. Cloning primers are shown in Table 8.

[0453] The amino acid sequence identity of the PtIP-83Aa homologs as calculated using the Needleman-Wunsch algorithm, as implemented in the Needle program (EMBOSS tool suite) are shown in Table 9a-9c.

TABLE 9a

| | PtIP-83Ca | PtIP-83Cb | PtIP-83Cc | PtIP-83Cd | PtIP-83Ce | PtIP-83Cf | PtIP-83Cg | PtIP-83Ch-like | PtIP-83Ch | PtIP-83Ci-like |
|---|---|---|---|---|---|---|---|---|---|---|
| | SEQ ID | SEQ ID | SEQ ID | SEQ ID | SEQ ID | SEQ ID | SEQ ID | SEQ ID | SEQ ID | SEQ ID |
| | NO: 5 | NO: 7 | NO: 9 | NO: 11 | NO: 13 | NO: 15 | NO: 17 | NO: 755 | NO: 754 | NO: 759 |
| PtIP-83Aa | 71.4 | 71.2 | 71.9 | 72.0 | 71.5 | 77.4 | 71.5 | 74.8 | 74.8 | 70.9 |
| SEQ ID NO: 1 | | | | | | | | | | |
| PtIP-83Ca | — | 76.4 | 98.5 | 98.2 | 98.0 | 79.3 | 76.6 | 80.6 | 80.6 | 75.8 |
| SEQ ID NO: 5 | | | | | | | | | | |
| PtIP-83Cb | — | — | 76.7 | 76.8 | 76.3 | 77.6 | 98.6 | 78.0 | 78.0 | 96.6 |
| SEQ ID NO: 7 | | | | | | | | | | |
| PtIP-83Cc | — | — | — | 99.8 | 99.5 | 79.1 | 76.9 | 80.8 | 80.8 | 75.8 |
| SEQ ID NO: 9 | | | | | | | | | | |
| PtIP-83Cd | — | — | — | — | 99.3 | 79.3 | 76.9 | 80.9 | 80.9 | 75.8 |
| SEQ ID NO: 11 | | | | | | | | | | |
| PtIP-83Ce | — | — | — | — | — | 78.7 | 76.5 | 80.6 | 80.6 | 75.6 |
| SEQ ID NO: 13 | | | | | | | | | | |
| PtIP-83Cf | — | — | — | — | — | — | 77.8 | 84.0 | 84.0 | 77.3 |
| SEQ ID NO: 15 | | | | | | | | | | |
| PtIP-83Cg | — | — | — | — | — | — | — | 78.2 | 78.2 | 97.1 |
| SEQ ID NO: 17 | | | | | | | | | | |
| PtIP-83Ch-like | — | — | — | — | — | — | — | — | 99.9 | 77.4 |
| SEQ ID NO: 755 | | | | | | | | | | |
| PtIP-83Ch | — | — | — | — | — | — | — | — | — | 77.4 |
| SEQ ID NO: 754 | | | | | | | | | | |
| PtIP-83Ci-like | — | — | — | — | — | — | — | — | — | — |
| SEQ ID NO: 759 | | | | | | | | | | |
| PtIP-83Ci | — | — | — | — | — | — | — | — | — | — |
| SEQ ID NO: 758 | | | | | | | | | | |
| PtIP-83Cj-like | — | — | — | — | — | — | — | — | — | — |
| SEQ ID NO: 763 | | | | | | | | | | |
| PtIP-83Cj | — | — | — | — | — | — | — | — | — | — |
| SEQ ID NO: 762 | | | | | | | | | | |
| PtIP-83Da | — | — | — | — | — | — | — | — | — | — |
| SEQ ID NO: 19 | | | | | | | | | | |
| PtIP-83Ea | — | — | — | — | — | — | — | — | — | — |
| SEQ ID NO: 21 | | | | | | | | | | |
| PtIP-83Eb | — | — | — | — | — | — | — | — | — | — |
| SEQ ID NO: 23 | | | | | | | | | | |
| PtIP-83Fa | — | — | — | — | — | — | — | — | — | — |
| SEQ ID NO: 3 | | | | | | | | | | |
| PtIP-83Fb | — | — | — | — | — | — | — | — | — | — |
| SEQ ID NO: 716 | | | | | | | | | | |
| PtIP-83Fd | — | — | — | — | — | — | — | — | — | — |
| SEQ ID NO: 756 | | | | | | | | | | |
| PtIP-83Fe | — | — | — | — | — | — | — | — | — | — |
| SEQ ID NO: 757 | | | | | | | | | | |
| PtIP-83Ff-like | — | — | — | — | — | — | — | — | — | — |
| SEQ ID NO: 761 | | | | | | | | | | |
| PtIP-83Ff | — | — | — | — | — | — | — | — | — | — |
| SEQ ID NO: 760 | | | | | | | | | | |
| PtIP-83Fg | — | — | — | — | — | — | — | — | — | — |
| SEQ ID NO: 766 | | | | | | | | | | |
| PtIP-83Fh | — | — | — | — | — | — | — | — | — | — |
| SEQ ID NO: 767 | | | | | | | | | | |
| PtIP-83Fi-like | — | — | — | — | — | — | — | — | — | — |
| SEQ ID NO: 769 | | | | | | | | | | |
| PtIP-83Fi | — | — | — | — | — | — | — | — | — | — |
| SEQ ID NO: 768 | | | | | | | | | | |
| PtIP-83Ga-like | — | — | — | — | — | — | — | — | — | — |
| SEQ ID NO: 765 | | | | | | | | | | |

TABLE 9b

| | PtIP-83Ci | PtIP-83Cj-like | PtIP-83Cj | PtIP-83Da | PtIP-83Ea | PtIP-83Eb | PtIP-83Fa | PtIP-83Fb | PtIP-83Fd |
|---|---|---|---|---|---|---|---|---|---|
| | SEQ ID | SEQ ID | SEQ ID | SEQ ID | SEQ ID | SEQ ID | SEQ ID | SEQ ID | SEQ ID |
| | NO: 758 | NO: 763 | NO: 762 | NO: 19 | NO: 21 | NO: 23 | NO: 3 | NO: 716 | NO: 756 |
| PtIP-83Aa | 71.0 | 75.5 | 73.6 | 64.7 | 55.8 | 55.4 | 49.8 | 50.1 | 50.8 |
| SEQ ID NO: 1 | | | | | | | | | |
| PtIP-83Ca | 75.9 | 79.5 | 77.5 | 89.7 | 68.6 | 79.1 | 48.8 | 48.3 | 48.8 |
| SEQ ID NO: 5 | | | | | | | | | |
| PtIP-83Cb | 96.7 | 79.5 | 77.2 | 68.8 | 59.3 | 60.2 | 49.7 | 49.3 | 50.4 |
| SEQ ID NO: 7 | | | | | | | | | |
| PtIP-83Cc | 76.0 | 79.8 | 77.8 | 91.1 | 70.1 | 80.4 | 49.2 | 48.7 | 49.1 |
| SEQ ID NO: 9 | | | | | | | | | |
| PtIP-83Cd | 76.0 | 79.9 | 77.9 | 90.8 | 70.1 | 80.2 | 49.2 | 48.7 | 49.2 |
| SEQ ID NO: 11 | | | | | | | | | |
| PtIP-83Ce | 75.7 | 79.8 | 77.8 | 90.7 | 70.5 | 80.9 | 49.3 | 48.8 | 48.9 |
| SEQ ID NO: 13 | | | | | | | | | |
| PtIP-83Cf | 77.4 | 87.1 | 84.8 | 71.4 | 60.5 | 61.8 | 49.3 | 48.9 | 52.8 |
| SEQ ID NO: 15 | | | | | | | | | |
| PtIP-83Cg | 97.2 | 79.6 | 77.4 | 69.1 | 59.3 | 60.4 | 49.5 | 49.4 | 50.5 |
| SEQ ID NO: 17 | | | | | | | | | |
| PtIP-83Ch-like | 77.6 | 84.9 | 82.6 | 72.5 | 62.5 | 62.9 | 50.6 | 50.6 | 52.5 |
| SEQ ID NO: 755 | | | | | | | | | |
| PtIP-83Ch | 77.6 | 84.9 | 82.6 | 72.5 | 62.5 | 62.9 | 50.6 | 50.7 | 52.5 |
| SEQ ID NO: 754 | | | | | | | | | |
| PtIP-83Ci-like | 99.9 | 79.0 | 76.8 | 68.1 | 58.9 | 59.9 | 49.9 | 49.8 | 49.3 |
| SEQ ID NO: 759 | | | | | | | | | |
| PtIP-83Ci | — | 79.1 | 76.9 | 68.2 | 59.1 | 59.9 | 50.1 | 49.9 | 49.4 |
| SEQ ID NO: 758 | | | | | | | | | |
| PtIP-83Cj-like | — | — | 97.0 | 71.7 | 61.1 | 62.7 | 50.7 | 50.7 | 51.5 |
| SEQ ID NO: 763 | | | | | | | | | |
| PtIP-83Cj | — | — | — | 69.7 | 61.6 | 60.7 | 50.3 | 50.3 | 50.4 |
| SEQ ID NO: 762 | | | | | | | | | |
| PtIP-83Da | — | — | — | — | 61.4 | 71.7 | 43.5 | 43.0 | 44.4 |
| SEQ ID NO: 19 | | | | | | | | | |
| PtIP-83Ea | — | — | — | — | — | 51.6 | 38.7 | 38.6 | 38.7 |
| SEQ ID NO: 21 | | | | | | | | | |
| PtIP-83Eb | — | — | — | — | — | — | 38.8 | 38.2 | 37.9 |
| SEQ ID NO: 23 | | | | | | | | | |
| PtIP-83Fa | — | — | — | — | — | — | — | 97.1 | 48.4 |
| SEQ ID NO: 3 | | | | | | | | | |
| PtIP-83Fb | — | — | — | — | — | — | — | — | 48.7 |
| SEQ ID NO: 716 | | | | | | | | | |
| PtIP-83Fd | — | — | — | — | — | — | — | — | — |
| SEQ ID NO: 756 | | | | | | | | | |
| PtIP-83Fe | — | — | — | — | — | — | — | — | — |
| SEQ ID NO: 757 | | | | | | | | | |
| PtIP-83Ff-like | — | — | — | — | — | — | — | — | — |
| SEQ ID NO: 761 | | | | | | | | | |
| PtIP-83Ff | — | — | — | — | — | — | — | — | — |
| SEQ ID NO: 760 | | | | | | | | | |
| PtIP-83Fg | — | — | — | — | — | — | — | — | — |
| SEQ ID NO: 766 | | | | | | | | | |
| PtIP-83Fh | — | — | — | — | — | — | — | — | — |
| SEQ ID NO: 767 | | | | | | | | | |
| PtIP-83Fi-like | — | — | — | — | — | — | — | — | — |
| SEQ ID NO: 769 | | | | | | | | | |
| PtIP-83Fi | — | — | — | — | — | — | — | — | — |
| SEQ ID NO: 768 | | | | | | | | | |
| PtIP-83Ga-like | — | — | — | — | — | — | — | — | — |
| SEQ ID NO: 765 | | | | | | | | | |

TABLE 9c

| | PtIP-83Fe | PtIP-83Ff-like | PtIP-83Ff | PtIP-83Fg | PtIP-83Fh | PtIP-83Fi-like | PtIP-83Fi | PtIP-83Ga-like | PtIP-83Ga |
|---|---|---|---|---|---|---|---|---|---|
| | SEQ ID | SEQ ID | SEQ ID | SEQ ID | SEQ ID | SEQ ID | SEQ ID | SEQ ID | SEQ ID |
| | NO: 757 | NO: 761 | NO: 760 | NO: 766 | NO: 767 | NO: 769 | NO: 768 | NO: 765 | NO: 764 |
| PtIP-83Aa | 51.0 | 51.1 | 50.8 | 49.8 | 47.3 | 50.2 | 50.2 | 34.5 | 34.6 |
| SEQ ID NO: 1 | | | | | | | | | |
| PtIP-83Ca | 49.0 | 49.2 | 49.2 | 47.8 | 45.6 | 47.4 | 47.4 | 35.0 | 35.1 |
| SEQ ID NO: 5 | | | | | | | | | |
| PtIP-83Cb | 50.5 | 51.0 | 51.0 | 48.0 | 47.3 | 47.4 | 47.4 | 34.5 | 34.6 |
| SEQ ID NO: 7 | | | | | | | | | |
| PtIP-83Cc | 49.2 | 49.7 | 49.7 | 48.1 | 46.0 | 47.6 | 47.6 | 35.0 | 35.1 |
| SEQ ID NO: 9 | | | | | | | | | |
| PtIP-83Cd | 49.3 | 49.8 | 49.8 | 48.2 | 46.1 | 47.7 | 47.7 | 35.1 | 35.2 |
| SEQ ID NO: 11 | | | | | | | | | |
| PtIP-83Ce | 49.0 | 49.5 | 49.5 | 48.2 | 46.0 | 47.7 | 47.7 | 35.0 | 35.1 |
| SEQ ID NO: 13 | | | | | | | | | |
| PtIP-83Cf | 52.5 | 51.5 | 51.5 | 49.7 | 48.3 | 49.3 | 49.3 | 35.5 | 35.6 |
| SEQ ID NO: 15 | | | | | | | | | |
| PtIP-83Cg | 50.7 | 50.4 | 50.4 | 47.8 | 46.9 | 47.2 | 47.2 | 34.5 | 34.6 |
| SEQ ID NO: 17 | | | | | | | | | |
| PtIP-83Ch-like | 52.4 | 51.5 | 51.6 | 49.7 | 48.4 | 49.4 | 49.4 | 34.6 | 34.7 |
| SEQ ID NO: 755 | | | | | | | | | |
| PtIP-83Ch | 52.4 | 51.5 | 51.6 | 49.7 | 48.1 | 49.7 | 49.7 | 34.7 | 34.8 |
| SEQ ID NO: 754 | | | | | | | | | |
| PtIP-83Ci-like | 49.9 | 50.9 | 50.5 | 47.9 | 47.0 | 47.6 | 47.6 | 34.6 | 34.7 |
| SEQ ID NO: 759 | | | | | | | | | |
| PtIP-83Ci | 50.1 | 51.0 | 50.7 | 48.0 | 47.1 | 47.7 | 47.7 | 34.5 | 34.6 |
| SEQ ID NO: 758 | | | | | | | | | |
| PtIP-83Cj-like | 51.5 | 51.5 | 51.5 | 49.3 | 46.7 | 49.2 | 49.2 | 35.2 | 35.3 |
| SEQ ID NO: 763 | | | | | | | | | |
| PtIP-83Cj | 50.4 | 50.2 | 50.2 | 48.9 | 46.1 | 48.8 | 48.8 | 34.8 | 34.9 |
| SEQ ID NO: 762 | | | | | | | | | |
| PtIP-83Da | 44.6 | 44.6 | 44.6 | 42.5 | 40.5 | 42.0 | 42.0 | 30.5 | 30.6 |
| SEQ ID NO: 19 | | | | | | | | | |
| PtIP-83Ea | 38.6 | 38.7 | 38.7 | 39.6 | 36.9 | 39.3 | 39.3 | 29.0 | 29.1 |
| SEQ ID NO: 21 | | | | | | | | | |
| PtIP-83Eb | 38.1 | 38.7 | 38.7 | 36.6 | 36.1 | 36.4 | 36.4 | 27.4 | 27.5 |
| SEQ ID NO: 23 | | | | | | | | | |
| PtIP-83Fa | 48.3 | 48.9 | 49.5 | 73.4 | 64.6 | 71.9 | 71.9 | 31.8 | 31.9 |
| SEQ ID NO: 3 | | | | | | | | | |
| PtIP-83Fb | 48.8 | 48.9 | 48.9 | 73.0 | 64.3 | 71.8 | 71.8 | 31.9 | 32.0 |
| SEQ ID NO: 716 | | | | | | | | | |
| PtIP-83Fd | 96.5 | 72.9 | 73.0 | 49.9 | 47.7 | 49.2 | 49.3 | 33.8 | 33.7 |
| SEQ ID NO: 756 | | | | | | | | | |
| PtIP-83Fe | — | 72.9 | 73.0 | 50.0 | 47.7 | 49.2 | 49.3 | 33.5 | 33.4 |
| SEQ ID NO: 757 | | | | | | | | | |
| PtIP-83Ff-like | — | — | 99.9 | 49.1 | 46.5 | 48.4 | 48.5 | 33.1 | 33.1 |
| SEQ ID NO: 761 | | | | | | | | | |
| PtIP-83Ff | — | — | — | 49.1 | 46.5 | 48.4 | 48.5 | 33.2 | 33.2 |
| SEQ ID NO: 760 | | | | | | | | | |
| PtIP-83Fg | — | — | — | — | 66.4 | 94.8 | 94.9 | 31.8 | 31.9 |
| SEQ ID NO: 766 | | | | | | | | | |
| PtIP-83Fh | — | — | — | — | — | 65.3 | 65.4 | 31.1 | 31.1 |
| SEQ ID NO: 767 | | | | | | | | | |
| PtIP-83Fi-like | — | — | — | — | — | — | 99.9 | 32.1 | 32.2 |
| SEQ ID NO: 769 | | | | | | | | | |
| PtIP-83Fi | — | — | — | — | — | — | — | 32.2 | 32.3 |
| SEQ ID NO: 768 | | | | | | | | | |
| PtIP-83Ga-like | — | — | — | — | — | — | — | — | 99.9 |
| SEQ ID NO: 765 | | | | | | | | | |

### Example 4: Transient Expression in Leaves and Insect Bioassay

[0454] To confirm activity of PtIP-83Aa (SEQ ID NO: 1) a transient expression system under control of a viral promoter pDMMV and/or AtUBQ10 (Dav, et. al., (1999) Plant Mol. Biol. 40:771-782; Norris S R et al (1993) Plant Mol Biol. 21(5):895-906) was utilized. The agro-infiltration method of introducing an Agrobacterium cell suspension to plant cells of intact tissues so that reproducible infection and subsequent plant derived transgene expression may be measured or studied is well known in the art (Kapila, et. al., (1997) Plant Science 122:101-108). Briefly, the unifoliate stage of bush bean (common bean, Phaseolus vulgaris) or soybean (Glycine max), were agro-infiltrated with normalized bacterial cell cultures of test and control strains. After 4 to 7 days leaf disks were excised from each plantlet and infested with 2 neonates of Soybean Looper (SBL) (Chrysodeixis includens), 2 neonates of Corn Earworm (CEWV) (Helicoverpa zea), 2 neonates of Fall Armyworm (Spodoptera frugiperda) or 4 neonates of European Corn Borer (ECB) (Ostrinia nubilalis) alone. Control leaf discs were generated with Agrobacterium containing only a DsRed2 fluorescence marker (Clontech™, 1290 Terra Bella Ave. Mountain View, CA 94043) expression vector. Leaf discs from non-infiltrated plants were included as a second control. The consumption of green leaf tissue was scored two (CEW, FAW) or three (ECB, SBL, FAW) days after infestation and given scores of 0 to 9. The transiently expressed PtIP-83Aa (SEQ ID NO: 1), protected leaf discs from consumption by the infested insects while total green tissue consumption was observed for the negative control and untreated tissue (Table 10). Transient protein expression of PtIP-83Aa (SEQ ID NO: 1) was confirmed by mass spectrometry-based protein identification using trypsinized protein extracts of infiltrated leaf tissues (Patterson, (1998) 10(22):1-24, Current Protocol in Molecular Biology published by John Wiley & Son Inc). Transient expression can be verified by using HA or EPEA tagged PtIP-83 polypeptides by western analysis of the HA or EPEA tags.

TABLE 10

| Transient | Leaf Disc Consumption (Scale 1 to 9) | | | |
|---|---|---|---|---|
| expression | FAW | CEW | SBL | ECB |
| PtIP-83Aa | 8.3 | 8.3 | 8.6 | 8.9 |

| Value | Description |
|---|---|
| 1 | leaf disk is greater than 90% consumed |
| 2 | leaf disk is 70-80% consumed |
| 3 | leaf disk is 60-70% consumed |
| 4 | leaf disk is 50-60% consumed |
| 5 | leaf disk is 40-50% consumed |
| 6 | leaf disk is less than 30% consumed |
| 7 | leaf disk is less than 10% consumed |
| 8 | leaf disk has only a few pinholes |
| 9 | leaf disk is untouched by the insect |

[0455] Activity of PtIP-83Fa (SEQ ID NO: 4) was validated using the bush bean transient expression system and found to be comparable to PtIP-83Aa (SEQ ID NO: 2). PtIP-83Fa (SEQ ID NO: 4) showed a similar insecticidal activity spectrum except for lacking activity against FAW (Table 11).

TABLE 11

| Transient | Leaf Disc Consumption (Scale 1 to 9) | | | |
|---|---|---|---|---|
| experiment | FAW | CEW | SBL | ECB |
| PtIP-83Fa | 1.0 | 6.8 | 8.1 | 7.4 |
| Vector control | 1.7 | 2.3 | 1.1 | 1.8 |
| blank | 1.0 | 1.1 | 1.4 | 1.0 |

[0456] Activity of PtIP-83Ca (SEQ ID NO: 5), PtIP-83Cb (SEQ ID NO: 7), PtIP-83Cc (SEQ ID NO: 9), PtIP-83Cd (SEQ ID NO: 11), PtIP-83Ce (SEQ ID NO: 13), PtIP-83Cf (SEQ ID NO: 15), PtIP-83Cg (SEQ ID NO: 17), PtIP-83 Da (SEQ ID NO: 19), PtIP-83Ea (SEQ ID NO: 21), PtIP-83Eb (SEQ ID NO: 23), PtIP-83Fb (SEQ ID NO: 716), PtIP-83Ch (SEQ ID NO: 754), PtIP-83Ch-like (SEQ ID NO: 755), PtIP-83Fd (SEQ ID NO: 756), PtIP-83Fe (SEQ ID NO: 757), PtIP-83C (SEQ ID NO: 758), PtIP-83Ci-like (SEQ ID NO: 759), PtIP-83Ff (SEQ ID NO: 760), PtIP-83Ff-like (SEQ ID NO: 761), and other polypeptides as shown in Table 12 were also validated using a bush bean transient expression system. The activity spectra for all PtIP-83 homologs are summarized in Table 12, where a “+” indicates an average activity score of <=60% of leaf disc consumed, a “−” indicates an average activity score of >=60% leaf disc consumed, and “ND” indicates not determined.

TABLE 12

| | SEQ ID NO: | FAW | CEW | SBL | ECB |
|---|---|---|---|---|---|
| PtIP-83Aa | 1 | + | + | + | + |
| PtIP-83Ca | 5 | − | + | + | + |
| PtIP-83Cb | 7 | + | + | + | − |
| PtIP-83Cc | 9 | + | + | + | + |
| PtIP-83Cd | 11 | + | + | + | + |
| PtIP-83Ce | 13 | − | + | + | + |
| PtIP-83Cf | 15 | − | − | + | − |
| PtIP-83Cg | 17 | + | + | + | + |
| PtIP-83Da | 19 | − | − | − | − |
| PtIP-83Ea | 21 | − | − | − | + |
| PtIP-83Eb | 23 | − | − | − | − |
| PtIP-83Fa | 3 | − | + | + | + |
| PtIP-83Fb | 716 | | + | + | + |
| PtIP-83Ch | 754 | − | − | − | + |
| PtIP-83Ch-like | 755 | − | − | − | + |
| PtIP-83Fd | 756 | − | − | + | − |
| PtIP-83Fe | 757 | − | − | − | − |
| PtIP-83Ci | 758 | + | + | + | + |
| PtIP-83Ci-like | 759 | + | + | + | + |
| PtIP-83Ff | 760 | − | − | − | − |
| PtIP-83Ff-like | 761 | + | − | + | + |
| PtIP-83Fk | 958 | − | + | + | ND |
| PtIP-83Fl | 959 | + | + | + | + |
| PtIP-83Fm | 960 | + | + | − | ND |
| PtIP-83Fn | 961 | + | + | − | ND |
| PtIP-83Cl | 962 | + | + | + | + |
| PtIP-83Cm | 963 | + | + | + | − |
| PtIP-83Cn | 964 | + | + | + | − |
| PtIP-83Co | 965 | − | − | + | + |
| PtIP-83Fj | 966 | − | − | − | + |
| PtIP-83Fo | 967 | + | − | − | + |
| PtIP-83Gb | 968 | + | + | + | + |
| PtIP-83Fp | 969 | − | − | − | − |
| PtIP-83Fq | 970 | − | − | − | − |
| PtIP-83Fr | 971 | − | − | − | − |
| PtIP-83Fs | 972 | − | − | − | + |
| PtIP-83Ft | 973 | − | − | − | + |
| PtIP-83Gc | 974 | − | − | − | − |
| PtIP-83Fu | 975 | + | − | − | + |
| PtIP-83Ha | 976 | + | − | − | + |
| PtIP-83Gd | 977 | − | − | − | − |
| PtIP-83Hb | 978 | − | − | − | − |
| PtIP-83Cq | 979 | − | − | + | + |
| PtIP-83Cr | 980 | − | − | + | + |
| PtIP-83Cs | 981 | − | − | − | + |
| PtIP-83Ct | 982 | − | − | − | + |
| PtIP-83Cu | 983 | − | − | + | + |
| PtIP-83Cv | 984 | − | − | − | + |
| PtIP-83Cw | 985 | − | − | − | + |
| PtIP-83Cx | 986 | − | − | + | + |
| PtIP-83Ed | 987 | − | − | − | + |
| PtIP-83Ec | 988 | − | − | − | + |
| PtIP-83Fv | 989 | + | − | + | − |
| PtIP-83Fw | 990 | + | − | + | − |
| PtIP-83Fx | 991 | − | − | − | − |
| PtIP-83Fy | 992 | + | − | + | − |
| PtIP-83Fz | 993 | − | − | + | + |
| PtIP-83Faa | 994 | − | − | − | − |
| PtIP-83Hc | 995 | − | − | − | − |
| PtIP-83Fab | 996 | − | − | − | − |
| PtIP-83Gf | 997 | − | − | − | − |
| PtIP-83Gg | 998 | − | − | − | − |
| PtIP-83Gh | 999 | + | − | − | + |
| PtIP-83Gi | 1000 | − | − | − | − |
| PtIP-83Gj | 1001 | − | − | − | − |
| PtIP-83Gk | 1002 | − | + | + | − |
| PtIP-83Fac | 1003 | − | − | − | + |
| PtIP-83Fad | 1004 | − | − | − | + |
| PtIP-83Cy | 1005 | − | − | + | + |
| PtIP-83Fae | 1006 | − | − | − | − |
| PtIP-83Faf | 1007 | − | − | + | + |
| PtIP-83Fah | 1008 | − | − | + | + |
| PtIP-83Fai | 1009 | − | − | − | − |
| PtIP-83Faj | 1010 | − | − | − | − |
| PtIP-83Fak | 1011 | − | − | − | − |
| PtIP-83Fal | 1012 | − | − | − | − |
| PtIP-83Fam | 1013 | − | − | − | − |
| PtIP-83Fan | 1014 | − | − | − | − |
| PtIP-83Fat | 1015 | + | − | + | + |
| PtIP-83Fau | 1016 | + | − | + | + |
| PtIP-83Fav | 1017 | + | − | + | + |
| PtIP-83Faw | 1018 | + | − | + | + |
| PtIP-83Fas | 1019 | + | − | + | + |
| PtIP-83Faq | 1020 | + | + | − | + |
| PtIP-83Fap | 1021 | − | + | − | − |
| PtIP-83Far | 1022 | − | − | − | − |
| PtIP-83Gl | 1023 | − | − | − | − |
| PtIP-83Gm | 1024 | − | − | − | − |
| PtIP-83Gn | 1025 | − | − | − | − |
| PtIP-83Fao | 1026 | − | + | + | + |

### Example 5: Baculovirus Expression of PtIP-83Aa Polypeptides

[0457] The gene encoding PtIP-83Aa SEQ ID NO: 2 was subcloned into the pFastBac™ Dual vector (Invitrogen®) with the stop codon removed for C-terminal translation of a 10×-histidine tag addition (SEQ ID NO: 27) and the sequence of the histidine-tagged PtIP-83Aa polypeptide is set forth as SEQ ID NO: 2. This vector was transformed into DH10Bac cells to generate baculovirus. These baculovirus were used to infect sf9 insect cells and incubated for 72 hours at 27° C. The infected insect cells were harvested by centrifugation. The cell culture pellet was suspended with 100 mL of lysis buffer (1×PBS, 10% glycerol, with protease inhibitor and benzonase) and incubated at 4° C. for 5 min with stirring, then homogenizing twice. The lysate was centrifuged at 16000 rpm for 20 min. The supernatant was saved and loaded onto two 2 mL Ni-NTA Hi-Bind Resin (Novagen, cat #70666) columns pre-equilibrated with Elute buffer (1×PBS, 10% glycerol). The columns were then sequentially eluted with 10 mLof Elute buffer containing 10, 20, 50, and 250 mM of imidazole. Samples were analyzed by SDS-PAGE. The purified fractions (E250) were concentrated using 100K Amicon® Ultra Centrifugal Filters (Millipore) to ˜0.5 mg/mL and demonstrated insecticidal activity against CEW, ECB, FAW and SBL similar to the activity spectrum obtained using transient expressing leaf discs.

### Example 6: Agrobacterium-Mediated Transformation of Maize and Regeneration of Transgenic Plants

[0458] For Agrobacterium-mediated transformation of maize with PtIP-83 nucleotide sequences such as PtIP-83Aa (SEQ ID NO: 2), PtIP-83Aa ModA (codon optimized) (SEQ ID NO: 28), and PtIP-83Aa ModB (codon optimized (SEQ ID NO: 29), the method of Zhao can be used (U.S. Pat. No. 5,981,840 and PCT Patent Publication Number WO 1998/32326; the contents of which are hereby incorporated by reference). Briefly, immature embryos were isolated from maize and the embryos contacted with a suspension of Agrobacterium under conditions whereby the bacteria are capable of transferring the nucleotide sequence (PtIP-83Aa SEQ ID NO: 2, PtIP-83Aa ModA (codon optimized)—SEQ ID NO: 28, and PtIP-83Aa ModB (codon optimized—SEQ ID NO: 29) to at least one cell of at least one of the immature embryos (step 1: the infection step). In this step the immature embryos can be immersed in an Agrobacterium suspension for the initiation of inoculation. The embryos were co-cultured for a time with the Agrobacterium (step 2: the co-cultivation step). The immature embryos can be cultured on solid medium following the infection step. Following this co-cultivation period an optional “resting” step is contemplated. In this resting step, the embryos were incubated in the presence of at least one antibiotic known to inhibit the growth of Agrobacterium without the addition of a selective agent for plant transformation (step 3: resting step). The immature embryos were cultured on solid medium with antibiotic, but without a selecting agent, for elimination of Agrobacterium and for a resting phase for the infected cells. Next, inoculated embryos were cultured on medium containing a selective agent and growing transformed callus is recovered (step 4: the selection step). The immature embryos were cultured on solid medium with a selective agent resulting in the selective growth of transformed cells. The callus was then regenerated into plants (step 5: the regeneration step), and calli grown on selective medium were cultured on solid medium to regenerate the plants.

### Example 7: Transformation and Regeneration of Soybean (Glycine max)

[0459] Transgenic soybean lines are generated by the method of particle gun bombardment (Klein et al., Nature (London) 327:70-73 (1987); U.S. Pat. No. 4,945,050) using a BIORAD Biolistic PDS1000/He instrument and either plasmid or fragment DNA. The following stock solutions and media are used for transformation and regeneration of soybean plants:

### Stock Solutions:

### Sulfate 100× Stock:

[0460] 37.0 g MgSO₄·7H₂O, 1.69 g MnSO₄·H₂O, 0.86 g ZnSO₄·7H₂O, 0.0025 g CuSO₄·5H₂O

### Halides 100× Stock:

[0461] 30.0 g CaCl₂·2H₂O, 0.083 g KI, 0.0025 g CoCl₂·6H₂O

### P, B, Mo 100× Stock:

[0462] 18.5 g KH₂PO₄, 0.62 g H₃BO₃, 0.025 g Na₂MoO₄·2H₂O

### Fe EDTA 100× Stock:

[0463] 3.724 g Na₂EDTA, 2.784 g FeSO₄·7H₂O

### 2,4-D Stock:

[0464] 10 mg/mL Vitamin

### B5 Vitamins, 1000× Stock:

[0465] 100.0 g myo-inositol, 1.0 g nicotinic acid, 1.0 g pyridoxine HCl, 10 g thiamine·HCL.

### Media (Per Liter):

### SB199 Solid Medium:

[0466] 1 package MS salts (Gibco/BRL—Cat. No. 11117-066), 1 mL B5 vitamins 1000×stock, 30 g Sucrose, 4 ml 2, 4-D (40 mg/L final concentration), pH 7.0, 2 gm Gelrite

### SB1 Solid Medium:

[0467] 1 package MS salts (Gibco/BRL—Cat. No. 11117-066), 1 mL B5 vitamins 1000×stock, 31.5 g Glucose, 2 mL 2, 4-D (20 mg/L final concentration), pH 5.7, 8 g TC agar

### SB196:

[0468] 10 mL of each of the above stock solutions 1-4, 1 mL B5 Vitamin stock, 0.463 g (NH4)2 SO4, 2.83 g KNO3, 1 mL 2,4 D stock, 1 g asparagine, 10 g Sucrose, pH 5.7

### SB71-4:

[0469] Gamborg's B5 salts, 20 g sucrose, 5 g TC agar, pH 5.7.

### SB103:

[0470] 1 pk. Murashige & Skoog salts mixture, 1 mL B5 Vitamin stock, 750 mg MgCl2 hexahydrate, 60 g maltose, 2 g Gelrite™, pH 5.7.

### SB166:

[0471] SB103 supplemented with 5 g per liter activated charcoal.

### Soybean Embryogenic Suspension Culture Initiation:

[0472] Pods with immature seeds from available soybean plants 45-55 days after planting are picked, removed from their shells and placed into a sterilized magenta box. The soybean seeds are sterilized by shaking them for 15 min in a 5% Clorox® solution with 1 drop of Ivory™ soap (i.e., 95 mL of autoclaved distilled water plus 5 mL Clorox® and 1 drop of soap, mixed well). Seeds are rinsed using 2 L sterile distilled water and those less than 3 mm are placed on individual microscope slides. The small end of the seed is cut and the cotyledons pressed out of the seed coat. Cotyledons are transferred to plates containing SB199 medium (25-30 cotyledons per plate) for 2 weeks, then transferred to SB1 for 2-4 weeks. Plates are wrapped with fiber tape. After this time, secondary embryos are cut and placed into SB196 liquid medium for 7 days.

### Culture Conditions:

[0473] Soy bean embryogenic suspension cultures (cv. 93Y21) were maintained in 50 mL liquid medium SB196 on a rotary shaker, 100-150 rpm, 26° C. on 16:8 h day/night photoperiod at light intensity of 80-100 pE/m2/s. Cultures are subcultured every 7-14 days by inoculating up to ½ dime size quantity of tissue (clumps bulked together) into 50 mL of fresh liquid SB196.

### Preparation of DNA for Bombardment:

[0474] In particle gun bombardment procedures it is possible to use purified 1) entire plasmid DNA; or 2) DNA fragments containing only the recombinant DNA expression cassette(s) of interest. For every seventeen bombardment transformations, 85 μL of suspension is prepared containing 1 to 90 picograms (pg) of plasmid DNA per base pair of each DNA plasmid. DNA plasmids or fragments are co-precipitated onto gold particles as follows. The DNAs in suspension are added to 50 μL of a 10-60 mg/mL 0.6 μm gold particle suspension and then combined with 50 μL CaCl₂ (2.5 M) and 20 μL spermidine (0.1 M). The mixture is vortexed for 5 sec, spun in a microfuge for 5 sec, and the supernatant removed. The DNA-coated particles are then washed once with 150 μL of 100% ethanol, vortexed and spun in a microfuge again, then resuspended in 85 μL of anhydrous ethanol. Five μL of the DNA-coated gold particles are then loaded on each macrocarrier disc.

Tissue Preparation and Bombardment with DNA:

[0475] Approximately 100 mg of two-week-old suspension culture is placed in an empty 60 mm×15 mm petri plate and the residual liquid removed from the tissue using a pipette. The tissue is placed about 3.5 inches away from the retaining screen and each plate of tissue is bombarded once. Membrane rupture pressure is set at 650 psi and the chamber is evacuated to −28 inches of Hg. Following bombardment, the tissue from each plate is divided between two flasks, placed back into liquid media, and cultured as described above.

### Selection of Transformed Embryos and Plant Regeneration:

[0476] After bombardment, tissue from each bombarded plate is divided and placed into two flasks of SB196 liquid culture maintenance medium per plate of bombarded tissue. Seven days post bombardment, the liquid medium in each flask is replaced with fresh SB196 culture maintenance medium supplemented with 100 ng/ml selective agent (selection medium). For selection of transformed soybean cells the selective agent used can be a sulfonylurea (SU) compound with the chemical name, 2-chloro-N-((4-methoxy-6 methy-1,3,5-triazine-2-yl)aminocarbonyl) benzenesulfonamide (common names: DPX-W4189 and chlorsulfuron). Chlorsulfuron is the active ingredient in the DuPont sulfonylurea herbicide, GLEAN®. The selection medium containing SU is replaced every two weeks for 8 weeks. After the 8 week selection period, islands of green, transformed tissue are observed growing from untransformed, necrotic embryogenic clusters. These putative transgenic events are isolated and kept in SB196 liquid medium with SU at 100 ng/ml for another 5 weeks with media changes every 1-2 weeks to generate new, clonally propagated, transformed embryogenic suspension cultures. Embryos spend a total of around 13 weeks in contact with SU. Suspension cultures are subcultured and maintained as clusters of immature embryos and also regenerated into whole plants by maturation and germination of individual somatic embryos.

[0477] Somatic embryos became suitable for germination after four weeks on maturation medium (1 week on SB166 followed by 3 weeks on SB103). They are then removed from the maturation medium and dried in empty petri dishes for up to seven days. The dried embryos are then planted in SB71-4 medium where they are allowed to germinate under the same light and temperature conditions as described above. Germinated embryos are transferred to potting medium and grown to maturity for seed production.

### Example 8—Particle bombardment Transformation and Regeneration of Transgenic Plants

[0478] Immature maize embryos from greenhouse donor plants are bombarded with a plasmid containing a nucleotide sequence encoding the insecticidal protein. The ears are husked and surface sterilized in 30% Clorox® bleach plus 0.5% Micro detergent for 20 minutes and rinsed two times with sterile water. The immature embryos are excised and placed embryo axis side down (scutellum side up), 25 embryos per plate, on 560Y medium for 4 hours and then aligned within the 2.5 cm target zone in preparation for bombardment. A plasmid vector DNA comprising the nucleotide sequence encoding the insecticidal protein operably linked to a promoter is precipitated onto 1.1 μm (average diameter) tungsten pellets using a CaCl₂ precipitation procedure as follows: 100 μl prepared tungsten particles in water; 10 μl (1 μg) DNA in Tris EDTA buffer (1 μg total DNA); 100 μl 2.5 M CaCl₂ and 10 μl 0.1 M spermidine.

[0479] Each reagent is added sequentially to the tungsten particle suspension, while maintained on the multitube vortexer. The final mixture is sonicated briefly and allowed to incubate under constant vortexing for 10 minutes. After the precipitation period, the tubes are centrifuged briefly, liquid removed, washed with 500 ml 100% ethanol and centrifuged for 30 seconds. Again the liquid is removed, and 105 μl 100% ethanol is added to the final tungsten particle pellet. For particle gun bombardment, the tungsten/DNA particles are briefly sonicated and 10 μl spotted onto the center of each macrocarrier and allowed to dry about 2 minutes before bombardment. The sample plates are bombarded at level #4 in a particle gun. All samples receive a single shot at 650 PSI, with a total of ten aliquots taken from each tube of prepared particles/DNA

[0480] Following bombardment, the embryos are kept on 560Y medium for 2 days, then transferred to 560R selection medium containing 3 mg/liter Bialaphos, and subcultured every 2 weeks. After approximately 10 weeks of selection, selection-resistant callus clones are transferred to 288J medium to initiate plant regeneration. Following somatic embryo maturation (2-4 weeks), well-developed somatic embryos are transferred to medium for germination and transferred to the lighted culture room. Approximately 7-10 days later, developing plantlets are transferred to 272V hormone-free medium in tubes for 7-10 days until plantlets are well established. Plants are then transferred to inserts in flats (equivalent to 2.5″ pot) containing potting soil and grown for 1 week in a growth chamber, subsequently grown an additional 1-2 weeks in the greenhouse, then transferred to classic 600 pots (1.6 gallon) and grown to maturity. Plants are monitored and scored for expression of a PtIP-83 polypeptide by assays known in the art, such as, for example, immunoassays and Western blotting.

[0481] Transgenic maize plants positive for expression of the insecticidal proteins are tested for pesticidal activity using standard bioassays known in the art. Such methods include, for example, root excision bioassays and whole plant bioassays. See, e.g., US Patent Application Publication Number US 2003/0120054 and International Publication Number WO 2003/018810.

[0482] Bombardment medium (560Y) comprises 4.0 g/l N6 basal salts (SIGMA C-1416), 1.0 ml/l Eriksson's Vitamin Mix (1000.times.SIGMA-1511), 0.5 mg/l thiamine HCl, 120.0 g/l sucrose, 1.0 mg/l 2,4-D and 2.88 g/l L-proline (brought to volume with D-I H₂O following adjustment to pH 5.8 with KOH); 2.0 g/l Gelrite (added after bringing to volume with D-I H₂O) and 8.5 mg/l silver nitrate (added after sterilizing the medium and cooling to room temperature). Selection medium (560R) comprises 4.0 g/l N6 basal salts (SIGMA C-1416), 1.0 ml/l Eriksson's Vitamin Mix (1000.times.SIGMA-1511), 0.5 mg/l thiamine HCl, 30.0 g/l sucrose and 2.0 mg/l 2,4-D (brought to volume with D-I H₂O following adjustment to pH 5.8 with KOH); 3.0 g/l Gelrite (added after bringing to volume with D-I H₂O) and 0.85 mg/l silver nitrate and 3.0 mg/l bialaphos (both added after sterilizing the medium and cooling to room temperature).

[0483] Plant regeneration medium (288J) comprises 4.3 g/l MS salts (GIBCO 11117-074), 5.0 ml/l MS vitamins stock solution (0.100 g nicotinic acid, 0.02 g/l thiamine HCL, 0.10 g/l pyridoxine HCL, and 0.40 g/l glycine brought to volume with polished D-I H₂O) (Murashige and Skoog, (1962) Physiol. Plant. 15:473), 100 mg/l myo-inositol, 0.5 mg/l zeatin, 60 g/l sucrose and 1.0 ml/l of 0.1 mM abscisic acid (brought to volume with polished D-I H₂O after adjusting to pH 5.6); 3.0 g/l Gelrite (added after bringing to volume with D-I H₂O) and 1.0 mg/l indoleacetic acid and 3.0 mg/l bialaphos (added after sterilizing the medium and cooling to 60° C.). Hormone-free medium (272V) comprises 4.3 g/l MS salts (GIBCO 11117-074), 5.0 ml/l MS vitamins stock solution (0.100 g/l nicotinic acid, 0.02 g/l thiamine HCL, 0.10 g/l pyridoxine HCL and 0.40 g/l glycine brought to volume with polished D-I H₂O), 0.1 g/l myo-inositol and 40.0 g/l sucrose (brought to volume with polished D-I H₂O after adjusting pH to 5.6) and 6 g/l bacto-agar (added after bringing to volume with polished D-I H₂O), sterilized and cooled to 60° C.

### Example 9. Insect Control Efficacy of Stable Transformed Soybean and Corn Plants Against Broad Spectrum of Lepidopteran Insects

[0484] Leaf discs are excised from the transformed plants and tested for insecticidal activity of PtIP-83 polypeptides against the Soy Bean Looper (SBL) (Chrysodeixis includens), Corn Earworm, (CEW) (Helicoverpa zea), European Corn Borer (ECB) (Ostrinia nubilalis), Velvet Bean Caterpillar (VBC) (Anticarsia gemmatalis) and Fall Armyworm (Spodoptera frugiperda).

### Example 10. Chimeras Between PtIP-83Aa (SEQ ID NO: 1) and PtIP-50Aa (SEQ ID NO: 34)

[0485] To generate single component active variants with diversified sequences, chimeras between PtIP-83Aa (SEQ ID NO: 1) and PtIP50Aa (SEQ ID NO: 34) were generated by multi-PCR fragments overlap assembly (Gibson Assembly Cloning Kit, New England Biolabs Inc.). A total of 6 chimeras were constructed: Table 13 shows the crossover points and the % sequence identity to PtIP-83Aa (SEQ ID NO: 1).

TABLE 13

| | | | | % Seq. | Soybean |
|---|---|---|---|---|---|
| Chimera | poly- | Beginning | Ending | iden. to | looper |
| Designation | nucleotide | crossover | crossover | PtIP-83Aa | active |
| Chimera 1 | SEQ ID | Q334 | S473 | 94 | No |
| SEQ ID NO: | NO: 634 | | | | |
| 640 | | | | | |
| Chimera 2 | SEQ ID | G469 | N615 | 95 | No |
| SEQ ID NO: | NO: 635 | | | | |
| 641 | | | | | |
| Chimera 3 | SEQ ID | P610 | E713 | 95 | Yes |
| SEQ ID NO: | NO: 636 | | | | |
| 642 | | | | | |
| Chimera 4 | SEQ ID | P754 | E873 | 94 | No |
| SEQ ID NO: | NO: 637 | | | | |
| 643 | | | | | |
| Chimera 5 | SEQ ID | F823 | E873 | 98 | Yes |
| SEQ ID NO: | NO: 638 | | | | |
| 644 | | | | | |
| Chimera 6 | SEQ ID | Q334 | E713 | 85 | No |
| SEQ ID NO: | NO: 639 | | | | |
| 645 | | | | | |

Crossover position numbers are based on the alignment shown in FIG. 3

[0486] The chimera genes were cloned into a plant transient expression vector and SBL activity assays were performed as described in Example 4.

### Example 11—Identification of Motifs Affecting the Protein Function of PtIP-83Aa

[0487] To identify sequence space affecting protein structural stability and insecticidal function of PtIP-83Aa, five unique motifs were identified by amino acid alignment among PtIP-83Aa, PtIP-50Aa (SEQ ID NO: 34), PtIP-50Ba (SEQ ID NO: 35), PtIP-50Bb (SEQ ID NO: 36), and PtIP-83Fa (SEQ ID NO: 3) (FIG. 4a-4c). Three conserved motifs: amino acids V53-P66 of SEQ ID NO: 1 were defined as Motif A, amino acids Q363-N373 of SEQ ID NO: 1 as Motif B and amino acids W556-A564 of SEQ ID NO: 1 as Motif C. Another two variable motifs were also picked: amino acids L646-W655 of SEQ ID NO: 1 as Motif D and amino acids R771-Y786 of SEQ ID NO: 1 as Motif E. Saturation mutagenesis primers were designed for these five motifs as shown in Table 14, Table 15, Table 16, Table 17 and Table 18. Saturation mutagenesis was performed using Agilent's QuikChange® Lightning Site-Directed Mutagenesis Kit. Mutations were introduced by amplifying a plant expression vector containing the polynucleotide of SEQ ID NO: 2 encoding the PtIP-83Aa polypeptide (SEQ ID NO: 1) using complementing forward and reverse primers containing a NNK degenerate codon at the targeted position. Amino acid substitutions at each targeted position were identified by DNA sequencing. Plant transient expression and SBL activity assays were performed as described in example 4. The amino acid substitutions identified in Motif A, Motif B, Motif C, Motif D, and Motif E of PtIP-83Aa (SEQ ID NO: 1) and the amino acid substitutions with insecticidal activity are shown in Table 14, Table 15, Table 16, Table 17 and Table 18 respectively.

TABLE 14

| Position | Oligo name | Primer | Identified substitutions | Active substitutions † |
|---|---|---|---|---|
| V53 | 083SM-V53-F | SEQ ID NO: 38 | A, C, D, E, F, G, H, K, L, N, P, Q, R, | A, C, T |
| | | | S, T, Y | |
| K54 | 083SM-K54-F | SEQ ID NO: 39 | A, C, D, E, F, G, H, I, L, M, N, P, Q, | A, C, D, E, G, H, I, L, M, N, Q, R, |
| | 083SM-K54-R | SEQ ID NO: 40 | R, S, T, V, W, Y | S, T |
| R55 | 083SM-R55-F | SEQ ID NO: 41 | A, D, E, F, G, H, K, L, M, N, P, Q, S, | A, D, E, F, G, H, K, L, M, N, Q, S, |
| | 083SM-R55-R | SEQ ID NO: 42 | T, V, W, Y | T, V, W, Y |
| L56 | 083SM-L56-F | SEQ ID NO: 43 | A, D, E, F, G, I, M, N, P, Q, R, S, T, | E, F, I, M, T, V |
| | 083SM-L56-R | SEQ ID NO: 44 | V, W, Y | |
| Y57 | 083SM-Y57-F | SEQ ID NO: 45 | A, C, D, E, G, H, I, K, L, M, N, P, Q, | C, I, L, M, T, V |
| | 083SM-Y57-R | SEQ ID NO: 46 | R, S, T, V | |
| V58 | 083SM-V58-F | SEQ ID NO: 47 | A, C, D, F, G, H, I, K, L, N, P, Q, R, | C, I, L |
| | 083SM-V58-R | SEQ ID NO: 48 | S, T, W, Y | |
| F59 | 083SM-F59-F | SEQ ID NO: 49 | A, C, D, E, G, H, I, K, L, M, N, P, Q, | L, M, V, Y |
| | 083SM-F59-R | SEQ ID NO: 50 | R, S, T, V, Y | |
| A60 | 083SM-A60-F | SEQ ID NO: 51 | C, D, E, F, G, H, I, L, M, N, P, Q, R, | C, G, S, T, V |
| | 083SM-A60-R | SEQ ID NO: 52 | S, T, V, Y | |
| D61 | 083SM-D61-F | SEQ ID NO: 53 | C, E, F, G, H, I, K, L, N, P, Q, R, S, | E, H, S |
| | 083SM-D61-R | SEQ ID NO: 54 | T, V, W, Y | |
| V62 | 083SM-V62-F | SEQ ID NO: 55 | A, C, D, E, F, G, H, I, K, L, M, N, P, | A, C, I, L, T |
| | 083SM-V62-R | SEQ ID NO: 56 | R, S, T, Y | |
| V63 | 083SM-V63-F | SEQ ID NO: 57 | A, C, G, H, I, K, L, M, N, P, Q, R, S, | A, C, I, L, M, T |
| | 083SM-V63-R | SEQ ID NO: 58 | T, W, Y | |
| E64 | 083SM-E64-F | SEQ ID NO: 59 | A, C, F, G, H, I, L, M, N, P, Q, R, S, | A, C, F, G, H, I, L, M, N, Q, R, S, |
| | 083SM-E64-R | SEQ ID NO: 60 | T, V, W, Y | T, V, W, Y |
| L65 | 083SM-L65-F | SEQ ID NO: 61 | A, C, D, F, G, H, I, M, N, P, Q, R, S, | A, C, F, H, I, M, N, Q, T, V, W |
| | 083SM-L65-R | SEQ ID NO: 62 | T, V, W, Y | |
| P66 | 083SM-P66-F | SEQ ID NO: 63 | A, C, D, E, F, G, I, K, L, M, N, Q, R, | D, G, M, Q, R |
| | 083SM-P66-R | SEQ ID NO: 64 | S, T, V, W, Y | |

† Active substitutions: average activity score <= 60% of leaf disk eaten

TABLE 15

| Position | Oligo name | Primer sequence | Identified substitutions | Active substitutions |
|---|---|---|---|---|
| Q363 | 083SM-Q363-F | SEQ ID NO: 65 | A, C, E, F, G, H, K, L, N, P, R, S, T, V, | A, C, E, F, G, H, K, L, N, R, S, T, |
| | 083SM-Q363-R | SEQ ID NO: 66 | W | V, W |
| I364 | 083SM-1364-F | SEQ ID NO: 67 | A, C, D, E, F, G, H, K, L, M, N, P, Q, R, | A, C, E, F, H, K, L, M, N, Q, S, T, |
| | 083SM-1364-R | SEQ ID NO: 68 | S, T, V, W, Y | V, W, Y |
| L365 | 083SM-L365-F | SEQ ID NO: 69 | A, E, F, G, H, I, K, M, N, P, R, S, T, V, | A, E, F, G, H, I, K, M, N, R, V, W, |
| | 083SM-L365-R | SEQ ID NO: 70 | W, Y | Y |
| G366 | 083SM-G366-F | SEQ ID NO: 71 | A, C, E, F, H, I, K, L, M, N, P, R, S, T, | A, C, F, H, I, K, L, M, N, S, T, V |
| | 083SM-G366-R | SEQ ID NO: 72 | V, W | |
| S367 | 083SM-S367-F | SEQ ID NO: 73 | A, C, D, E, F, G, H, I, L, M, N, P, Q, R, | A, C, D, E, F, G, H, I, L, M, N, P, |
| | 083SM-S367-R | SEQ ID NO: 74 | T, V, W | Q, R, T, V, W |
| Y368 | 083SM-Y368-F | SEQ ID NO: 75 | A, C, D, E, F, G, H, I, K, L, M, N, P, Q, | A, C, D, E, F, G, H, I, K, L, M, N, |
| | 083SM-Y368-R | SEQ ID NO: 76 | R, S, T, V, W | P, Q, R, S, T, V, W |
| L369 | 083SM-L369-F | SEQ ID NO: 77 | A, C, D, F, G, H, I, M, N, P, R, S, T, V | A, C, D, F, G, I, M, T, V |
| | 083SM-L369-R | SEQ ID NO: 78 | | |
| L370 | 083SM-L370-F | SEQ ID NO: 79 | A, C, D, E, F, G, H, I, K, M, N, P, Q, R, | A, C, D, E, F, G, H, I, K, M, Q, R, |
| | 083SM-L370-R | SEQ ID NO: 80 | S, T, V, W, Y | S, T, V, W, Y |
| Q371 | 083SM-Q371-F | SEQ ID NO: 81 | A, C, D, E, F, G, I, K, L, N, R, S, T, V, | A, C, D, E, F, G, I, K, L, N, R, S, |
| | 083SM-Q371-R | SEQ ID NO: 82 | W | T, V, W |
| Q372 | 083SM-Q372-F | SEQ ID NO: 83 | A, C, D, F, G, H, I, L, N, R, S, T, V, Y | A, C, D, F, G, H, I, L, N, R, S, V, |
| | 083SM-Q372-R | SEQ ID NO: 84 | | Y |
| N373 | 083SM-N373-F | SEQ ID NO: 85 | A, C, D, F, G, H, I, K, L, M, P, Q, R, S, | A, C, D, F, G, H, I, K, Q, S, T, V, |
| | 083SM-N373-R | SEQ ID NO: 86 | T, V, W, Y | W |

TABLE 16

| Position | Oligo name | Primer Sequence | Identified substitutions | Active substitutions |
|---|---|---|---|---|
| W556 | 083SM-W556-F | SEQ ID NO: 87 | A, C, D, F, G, I, K, L, M, N, P, Q, R, S, | F, T, Y |
| | 083SM-W556-R | SEQ ID NO: 88 | T, V, Y | |
| R557 | 083SM-R557-F | SEQ ID NO: 89 | C, D, G, H, I, K, L, M, N, P, Q, S, T, V, | C, D, G, H, I, K, L, M, N, P, Q, S, |
| | 083SM-R557-R | SEQ ID NO: 90 | W, Y | T, V, W, Y |
| A558 | 083SM-A558-F | SEQ ID NO: 91 | C, D, F, G, H, I, K, L, N, P, Q, R, S, V, | C, D, F, G, H, I, K, L, N, P, Q, R, |
| | 083SM-A558-R | SEQ ID NO: 92 | W, Y | S, V, W, Y |
| K559 | 083SM-K559-F | SEQ ID NO: 93 | A, C, F, G, H, I, L, N, P, Q, R, S, T, V, | A, C, F, G, H, I, L, N, Q, R, S, T, |
| | 083SM-K559-R | SEQ ID NO: 94 | Y | V, Y |
| C560 | 083SM-C560-F | SEQ ID NO: 95 | A, D, F, G, H, I, K, L, M, N, P, Q, R, S, | A, F, G, I, M, N, R, S, T, V |
| | 083SM-C560-R | SEQ ID NO: 96 | T, V, Y | |
| K561 | 083SM-K561-F | SEQ ID NO: 97 | A, C, D, E, F, G, H, I, L, M, N, P, R, S, | A, C, D, E, F, G, H, I, L, M, N, R, |
| | 083SM-K561-R | SEQ ID NO: 98 | T, V, Y | S, T, V, Y |
| N562 | 083SM-N562-F | SEQ ID NO: 99 | A, C, D, E, F, G, H, K, L, M, P, R, S, T, | C, D, E, G, H, L, M, R, S, T, V, Y |
| | 083SM-N562-R | SEQ ID NO: 100 | V, W, Y | |
| V563 | 083SM-V563-F | SEQ ID NO: 101 | A, C, D, F, G, H, I, K, L, M, N, P, Q, R, | A, C, D, F, H, I, L, M, N, Q, T, W |
| | 083SM-V563-R | SEQ ID NO: 102 | S, T, W | |
| A564 | 083SM-A564-F | SEQ ID NO: 103 | C, D, F, G, H, I, K, L, M, N, P, Q, R, S, | C, G, M, Q, S, T, V, W, Y |
| | 083SM-A564-R | SEQ ID NO: 104 | T, V, W, Y | |

TABLE 17

| Position | Oligo name | Oligo Sequence | Identified substitutions | Active substitutions |
|---|---|---|---|---|
| L646 | 083SM-L646-F | SEQ ID NO: 105 | A, C, D, E, F, G, H, I, K, M, N, P, Q, R, | A, C, G, I, M, N, Q, S, T, V |
| | 083SM-L646-R | SEQ ID NO: 106 | S, T, V, W, Y | |
| L647 | 083SM-L647-F | SEQ ID NO: 107 | A, D, F, G, H, I, K, M, N, P, Q, R, S, T, | D, G, M, N, Q, T |
| | 083SM-L647-R | SEQ ID NO: 108 | V, W, Y | |
| M648 | 083SM-M648-F | SEQ ID NO: 109 | A, C, D, E, F, G, H, K, L, N, P, Q, R, S, | A, C, D, E, F, G, H, K, L, N, P, Q, |
| | 083SM-M648-R | SEQ ID NO: 110 | T, V, W, Y | R, S, T, V, W, Y |
| P649 | 083SM-P649-F | SEQ ID NO: 111 | A, C, D, E, F, G, H, I, K, L, M, N, Q, R, | A, C, D, E, F, G, H, K, M, N, Q, R, |
| | 083SM-P649-R | SEQ ID NO: 112 | S, T, V, W, Y | S, T, W, Y |
| T650 | 083SM-T650-F | SEQ ID NO: 113 | A, C, D, F, G, H, I, K, L, M, P, Q, R, S, | A, C, D, F, G, H, I, K, L, M, P, Q, |
| | 083SM-T650-R | SEQ ID NO: 114 | V, Y | R, S, V, Y |
| E651 | 083SM-E651-F | SEQ ID NO: 115 | A, C, D, G, H, I, K, L, M, N, P, Q, R, S, | A, C, D, G, H, I, L, M, N, P, Q, R, |
| | 083SM-E651-R | SEQ ID NO: 116 | T, V, W, Y | S, T, V, Y |
| L652 | 083SM-L652-F | SEQ ID NO: 117 | A, C, D, E, F, G, H, I, K, M, N, P, Q, R, | C, F, I, K, M, P, R, S, T, V |
| | 083SM-L652-R | SEQ ID NO: 118 | S, T, V, Y | |
| T653 | 083SM-T653-F | SEQ ID NO: 119 | C, D, E, F, G, H, I, K, L, P, R, S, V, W | C, D, E, F, G, H, I, K, L, P, R, S, |
| | 083SM-T653-R | SEQ ID NO: 120 | | V, W |
| T654 | 083SM-T654-F | SEQ ID NO: 121 | A, C, F, H, I, K, L, M, N, P, Q, R, S, V, | A, C, F, I, K, L, M, P, R, S, V, W, |
| | 083SM-T654-R | SEQ ID NO: 122 | W, Y | Y |
| W655 | 083SM-W655-F | SEQ ID NO: 123 | A, C, E, F, G, L, N, Q, R, S, T, V, Y | F, Y |
| | 083SM-W655-R | SEQ ID NO: 124 | | |

TABLE 18

| Position | Oligo name | Primer Sequence | Identified substitutions | Active substitutions |
|---|---|---|---|---|
| R771 | 083SM-R771-F | SEQ ID NO: 125 | A, C, D, E, F, G, H, I, K, L, N, P, S, T, | A, D, E, F, G, H, I, K, L, N, S, T, |
| | 083SM-R771-R | SEQ ID NO: 126 | V, W, Y | V, W, Y |
| R772 | 083SM-R772-F | SEQ ID NO: 127 | A, C, D, E, F, G, H, I, K, L, M, P, Q, S, | A, C, D, E, F, G, H, I, K, L, M, P, |
| | 083SM-R772-R | SEQ ID NO: 128 | T, V, W, Y | Q, S, T, V, W, Y |
| D773 | 083SM-D773-F | SEQ ID NO: 129 | A, C, E, F, G, H, I, K, L, M, N, P, Q, R, | A, E, F, G, H, I, K, L, M, N, Q, R, |
| | 083SM-D773-R | SEQ ID NO: 130 | S, T, V, W, Y | S, T, V, W, Y |
| Q774 | 083SM-Q774-F | SEQ ID NO: 131 | A, D, G, H, I, K, L, M, N, P, R, S, T, V, | A, D, G, H, I, K, L, M, N, P, R, S, |
| | 083SM-Q774-R | SEQ ID NO: 132 | W, Y | T, V, W, Y |
| V775 | 083SM-V775-F | SEQ ID NO: 133 | A, C, D, E, G, H, I, L, M, N, P, Q, R, S, | A, C, D, E, G, H, I, N, P, Q, R, S, |
| | 083SM-V775-R | SEQ ID NO: 134 | T, Y | T, Y |
| L776 | 083SM-L776-F | SEQ ID NO: 135 | A, C, D, E, F, G, H, I, K, N, P, Q, R, S, | A, C, D, E, F, G, H, I, K, N, P, Q, |
| | 083SM-L776-R | SEQ ID NO: 136 | T, V, W, Y | R, S, T, V, Y |
| P777 | 083SM-P777-F | SEQ ID NO: 137 | A, C, D, E, F, G, H, K, L, M, N, Q, R, S, | A, C, D, E, F, G, H, K, L, M, N, Q, |
| | 083SM-P777-R | SEQ ID NO: 138 | T, V, W, Y | S, T, V, W, Y |
| F778 | 083SM-F778-F | SEQ ID NO: 139 | A, D, G, H, I, K, L, M, N, P, Q, R, S, T, | A, H, I, L, M, N, Q, S, V, W, Y |
| | 083SM-F778-R | SEQ ID NO: 140 | V, W, Y | |
| Q779 | 083SM-Q779-F | SEQ ID NO: 141 | A, C, D, E, F, G, H, I, K, L, N, P, R, S, | A, C, D, E, G, H, K, L, N, P, R, S, |
| | 083SM-Q779-R | SEQ ID NO: 142 | T, V, W | T, V |
| A780 | 083SM-A780-F | SEQ ID NO: 143 | C, D, E, F, G, H, K, L, N, P, Q, R, S, T, | C, N, P, Q, S |
| | 083SM-A780-R | SEQ ID NO: 144 | V, W, Y | |
| A781 | 083SM-A781-F | SEQ ID NO: 145 | C, D, E, F, G, H, I, L, M, N, P, Q, R, S, | C, D, E, F, G, H, I, N, Q, R, S, T, |
| | 083SM-A781-R | SEQ ID NO: 146 | T, V, W, Y | V, W, Y |
| A782 | 083SM-A782-F | SEQ ID NO: 147 | C, D, E, F, G, H, I, K, L, M, N, P, Q, R, | C, D, E, F, G, H, I, K, M, P, Q, R, |
| | 083SM-A782-R | SEQ ID NO: 148 | S, T, V, W, Y | S, T, V, W, Y |
| P783 | 083SM-P783-F | SEQ ID NO: 149 | A, C, D, E, F, G, H, I, L, M, N, Q, R, S, | A, C, D, E, G, H, N, Q, R, S, T, V |
| | 083SM-P783-R | SEQ ID NO: 150 | T, V, Y | |
| L784 | 083SM-L784-F | SEQ ID NO: 151 | A, C, D, E, F, G, H, I, K, M, N, P, Q, R, | A, E, F, H, I, K, M, N, P, Q, S, T, |
| | 083SM-L784-R | SEQ ID NO: 152 | S, T, V, W, Y | V, W |
| N785 | 083SM-N785-F | SEQ ID NO: 153 | A, C, E, F, G, H, I, K, L, M, P, Q, R, S, | A, C, E, F, G, H, I, K, L, M, Q, R, |
| | 083SM-N785-R | SEQ ID NO: 154 | T, V, W, Y | S, T, V, W, Y |
| Y786 | 083SM-Y786-F | SEQ ID NO: 155 | C, D, E, F, G, H, I, K, L, M, N, P, Q, R, | F, I, L, W |
| | 083SM-Y786-R | SEQ ID NO: 156 | S, T, V, W | |

### Example 12—PtIP-83Aa Variants with Multiple Amino Acid Substitutions in Motif a or Motif C

[0488] PtIP-83Aa variants with multiple amino acid substitutions within a motif were constructed for Motif A and Motif C using either the QuikChange® Lightning Site-Directed Mutagenesis Kit (Agilent) (as described in Example 11), or by multi-PCR fragment overlap assembly (Gibson Assembly Cloning Kit, New England Biolabs Inc.) into a plant transient vector containing the viral DMMV promoter. Primers used in constructing combinations of mutations within an individual motif are summarized in Table 19. The resulting combinatory libraries were transformed into Agrobacterium for plant transient expression and subsequent SBL activity assays as described in Example 4. Active variants, defined as having an average activity score of <=60% of leaf disk eaten, were sent for sequence identification.

TABLE 19

| Library | Primer | Sequence |
|---|---|---|
| Motif A | 83M1-CombiF1 | CTCGAGGGAGCCGAGAAAGTGADGCRSYTCTATRTCTTKDSCG |
| Combi-1 | | ACRTCVTCGWGVTCCCAGTCGTGGAATGGCGGTGG |
| | | SEQ ID NO: 157 |
| | 83M1-CombiF2 | CTCGAGGGAGCCGAGAAAGTGADGCRSYTCVTCRTCTTKDSCG |
| | | ACRTCVTCGWGVTCCCAGTCGTGGAATGGCGGTGG |
| | | SEQ ID NO: 158 |
| | 83M1-CombiRC1 | CCACCGCCATTCCACGACTGGGABCWCGABGAYGTCGSHMAAG |
| | | AYATAGARSYGCHTCACTTTCTCGGCTCCCTCGAG |
| | | SEQ ID NO: 159 |
| | 83M1-CombiRC2 | CCACCGCCATTCCACGACTGGGABCWCGABGAYGTCGSHMAAG |
| | | AYGABGARSYGCHTCACTTTCTCGGCTCCCTCGAG |
| | | SEQ ID NO: 160 |
| Motif A | 83M1Cmb2-R | CGGCCACCGCCATTCCACGACTGGTAGCWCGABAAYGTCGSHA |
| Combi-2 | | AAAAYATACAASYGCHTCACTTTCTCGGCTCCCTCGAGCTG |
| | | SEQ ID NO: 161 |
| | GZ550-83Aa-F | AATCTCTCATCTAAGAGGCTGGATCCTAGGATGGCTCTCGTGG |
| | | ATTACGGC |
| | | SEQ ID NO: 162 |
| | GZ550-83Aa-R | TGGCCAATCCAGAAGATGGACAAGTCTAGACTACTCTTCGTCG |
| | | TGCCGCCAG |
| | | SEQ ID NO: 163 |
| | 83M1Cmb2-3p-F | CTACCAGTCGTGGAATGGCGGTGGCCG SEQ ID NO: 164 |
| Motif C | PtIP-83-MotifC- | GTCTCGGAGGTTCCGGTGTGGABSGBCMRGTGCAASWSCGTGG |
| Combi | Combi-F1 | CTGCACTGGGTCGGGAGATG SEQ ID NO: 165 |
| | PtIP-83-MotifC- | GTCTCGGAGGTTCCGGTGTGGCWSGBCMRGTGCAASWSCGTGG |
| | Combi-F2 | CTGCACTGGGTCGGGAGATG SEQ ID NO: 166 |
| | PtIP-83-MotifC- | GTCTCGGAGGTTCCGGTGTGGABSGBCMRGTGCAASMATGTGG |
| | Combi-F3 | CTGCACTGGGTCGGGAGATG SEQ ID NO: 167 |
| | PtIP-83-MotifC- | GTCTCGGAGGTTCCGGTGTGGCWSGBCMRGTGCAASMATGTGG |
| | Combi-F4 | CTGCACTGGGTCGGGAGATG SEQ ID NO: 168 |
| | GZ550-83Aa-F | AATCTCTCATCTAAGAGGCTGGATCCTAGGATGGCTCTCGTGG |
| | | ATTACGGC SEQ ID NO: 162 |
| | GZ550-83Aa-R | TGGCCAATCCAGAAGATGGACAAGTCTAGACTACTCTTCGTCG |
| | | TGCCGCCAG SEQ ID NO: 163 |
| | PtIP-83-MotifC- | CACCGGAACCTCCGAGACTTCCGTT SEQ ID NO: 171 |
| | Gibson-R | |

[0489] Two libraries with differing mutation rates were screened for Motif A. Motif A Combi-1 contains potential mutations at positions K54, R55, L56, Y57, V58, F59, A60, V62, V63, E64, and L65 in PtIP-83Aa (SEQ ID NO: 1): Motif A Combi-2 contains potential mutations at positions K54, R55, V58, A60, V62, V63, and E64 in PtIP-83Aa (SEQ ID NO: 1): From Motif A Combi-1, sequences were recovered for 5 active unique variants (96 total screened). From Motif A Combi-2, sequences were recovered for 59 active unique variants (192 total screened). Table 20 summarizes the amino acid substitutions of the resulting active PtIP-83Aa Motif A variants as compared to PtIP-83Aa.

TABLE 20

| | | Motif A amino acid | Additional | Total # |
|---|---|---|---|---|
| Variants | DNA sequence | sequence | mutations | Mut. |
| PtIP-83Aa | SEQ ID NO: 2 | VKRLYVFADVVELP (a.a. 53- | | 0 |
| SEQ ID NO: 1 | | 66 of SEQ ID NO: 1) | | |
| PtIP-83cmbM1-1 | SEQ ID NO: 172 | VKHLYIFCDVIELP (a.a. 53- | | 4 |
| SEQ ID NO: 236 | | 66 of SEQ ID NO: 236) | | |
| PtIP-83cmbM1-2 | SEQ ID NO: 173 | VKHLYIFCDVVELP (a.a. 53- | | 3 |
| SEQ ID NO: 237 | | 66 of SEQ ID NO: 237) | | |
| PtIP-83cmbM1-3 | SEQ ID NO: 174 | VKHLYIFSDIIELP (a.a. 53- | | 5 |
| SEQ ID NO: 238 | | 66 of SEQ ID NO: 238) | | |
| PtIP-83cmbM1-4 | SEQ ID NO: 175 | VKHLYIFTDVLELP (a.a. 53- | | 4 |
| SEQ ID NO: 239 | | 66 of SEQ ID NO: 239) | | |
| PtIP-83cmbM1-5 | SEQ ID NO: 176 | VKHLYVFADIIVLP (a.a. 53- | | 4 |
| SEQ ID NO: 240 | | 66 of SEQ ID NO: 240) | | |
| PtIP-83cmbM1-6 | SEQ ID NO: 177 | VKHLYVFADVIELP (a.a. 53- | | 2 |
| SEQ ID NO: 241 | | 66 of SEQ ID NO: 241) | | |
| PtIP-83cmbM1-7 | SEQ ID NO: 178 | VKHLYVFGDVIELP (a.a. 53- | | 3 |
| SEQ ID NO: 242 | | 66 of SEQ ID NO: 242) | | |
| PtIP-83cmbM1-8 | SEQ ID NO: 179 | VKHLYVFSDVIELP (a.a. 53- | | 3 |
| SEQ ID NO: 243 | | 66 of SEQ ID NO: 243) | | |
| PtIP-83cmbM1-9 | SEQ ID NO: 180 | VKHLYVFSDVLVLP (a.a. 53- | | 4 |
| SEQ ID NO: 244 | | 66 of SEQ ID NO: 244) | | |
| PtIP-83cmbM1-10 | SEQ ID NO: 181 | VKQLIIFSDIIELP (a.a. 53- | | 6 |
| SEQ ID NO: 245 | | 66 of SEQ ID NO: 245) | | |
| PtIP-83cmbM1-11 | SEQ ID NO: 182 | VKQLYIFCDIIELP (a.a. 53- | | 5 |
| SEQ ID NO: 246 | | 66 of SEQ ID NO: 246) | | |
| PtIP-83cmbM1-12 | SEQ ID NO: 183 | VKQLYIFCDVLELP (a.a. 53- | | 4 |
| SEQ ID NO: 247 | | 66 of SEQ ID NO: 247) | | |
| PtIP-83cmbM1-13 | SEQ ID NO: 184 | VKQLYIFGDVIELP (a.a. 53- | | 4 |
| SEQ ID NO: 248 | | 66 of SEQ ID NO: 248) | | |
| PtIP-83cmbM1-14 | SEQ ID NO: 185 | VKQLYIFSDIIELP (a.a. 53- | V24I | 6 |
| SEQ ID NO: 249 | | 66 of SEQ ID NO: 249) | | |
| PtIP-83cmbM1-15 | SEQ ID NO: 186 | VKQLYVFCDILELP (a.a. 53- | | 4 |
| SEQ ID NO: 250 | | 66 of SEQ ID NO: 250) | | |
| PtIP-83cmbM1-16 | SEQ ID NO: 187 | VKQLYVFSDILELP (a.a. 53- | | 4 |
| SEQ ID NO: 251 | | 66 of SEQ ID NO: 251) | | |
| PtIP-83cmbM1-17 | SEQ ID NO: 188 | VKQLYVFSDVLVLP (a.a. 53- | | 4 |
| SEQ ID NO: 252 | | 66 of SEQ ID NO: 252) | | |
| PtIP-83cmbM1-18 | SEQ ID NO: 189 | VKRFYIFADIVELP (a.a. 53- | | 3 |
| SEQ ID NO: 253 | | 66 of SEQ ID NO: 253) | | |
| PtIP-83cmbM1-19 | SEQ ID NO: 190 | VKRFYIFSDIIELP (a.a. 53- | | 5 |
| SEQ ID NO: 254 | | 66 of SEQ ID NO: 254) | | |
| PtIP-83cmbM1-20 | SEQ ID NO: 191 | VKRFYVFSDIVELP (a.a. 53- | | 3 |
| SEQ ID NO: 255 | | 66 of SEQ ID NO: 255) | | |
| PtIP-83cmbM1-21 | SEQ ID NO: 192 | VKRLVILGDIIVVP (a.a. 53- | | 8 |
| SEQ ID NO: 256 | | 66 of SEQ ID NO: 256) | | |
| PtIP-83cmbM1-22 | SEQ ID NO: 193 | VKRLYIFADIIELP (a.a. 53- | | 3 |
| SEQ ID NO: 257 | | 66 of SEQ ID NO: 257) | | |
| PtIP-83cmbM1-23 | SEQ ID NO: 194 | VKRLYIFCDIIVLP (a.a. 53- | | 5 |
| SEQ ID NO: 258 | | 66 of SEQ ID NO: 258) | | |
| PtIP-83cmbM1-24 | SEQ ID NO: 195 | VKRLYIFCDIVELP (a.a. 53- | | 3 |
| SEQ ID NO: 259 | | 66 of SEQ ID NO: 259) | | |
| PtIP-83cmbM1-25 | SEQ ID NO: 196 | VKRLYIFGDIIELP (a.a. 53- | P74A | 5 |
| SEQ ID NO: 260 | | 66 of SEQ ID NO: 260) | | |
| PtIP-83cmbM1-26 | SEQ ID NO: 197 | VKRLYIFGDVIELP (a.a. 53- | | 3 |
| SEQ ID NO: 261 | | 66 of SEQ ID NO: 261) | | |
| PtIP-83cmbM1-27 | SEQ ID NO: 198 | VKRLYIFSDIIVLP (a.a. 53- | | 5 |
| SEQ ID NO: 262 | | 66 of SEQ ID NO: 262) | | |
| PtIP-83cmbM1-28 | SEQ ID NO: 199 | VKRLYIFSDILELP (a.a. 53- | | 4 |
| SEQ ID NO: 263 | | 66 of SEQ ID NO: 263) | | |
| PtIP-83cmbM1-29 | SEQ ID NO: 200 | VKRLYIFSDVIVLP (a.a. 53- | | 4 |
| SEQ ID NO: 264 | | 66 of SEQ ID NO: 264) | | |
| PtIP-83cmbM1-30 | SEQ ID NO: 201 | VKRLYIFTDVIELP (a.a. 53- | | 3 |
| SEQ ID NO: 265 | | 66 of SEQ ID NO: 265) | | |
| PtIP-83cmbM1-31 | SEQ ID NO: 202 | VKRLYVFCDIIELP (a.a. 53- | | 3 |
| SEQ ID NO: 266 | | 66 of SEQ ID NO: 266) | | |
| PtIP-83cmbM1-32 | SEQ ID NO: 203 | VKRLYVFCDIIVLP (a.a. 53- | | 4 |
| SEQ ID NO: 267 | | 66 of SEQ ID NO: 267) | | |
| PtIP-83cmbM1-33 | SEQ ID NO: 204 | VKRLYVFGDIVELP (a.a. 53- | | 2 |
| SEQ ID NO: 268 | | 66 of SEQ ID NO: 268) | | |
| PtIP-83cmbM1-34 | SEQ ID NO: 205 | VKRLYVFGDVVELP (a.a. 53- | | 1 |
| SEQ ID NO: 269 | | 66 of SEQ ID NO: 269) | | |
| PtIP-83cmbM1-35 | SEQ ID NO: 206 | VKRLYVFSDIIELP (a.a. 53- | | 3 |
| SEQ ID NO: 270 | | 66 of SEQ ID NO: 270) | | |
| PtIP-83cmbM1-36 | SEQ ID NO: 207 | VKRLYVFSDIVELP (a.a. 53- | | 2 |
| SEQ ID NO: 271 | | 66 of SEQ ID NO: 271) | | |
| PtIP-83cmbM1-37 | SEQ ID NO: 208 | VKRLYVFSDVIELP (a.a. 53- | | 2 |
| SEQ ID NO: 272 | | 66 of SEQ ID NO: 272) | | |
| PtIP-83cmbM1-38 | SEQ ID NO: 209 | VKRLYVFTDVIVLP (a.a. 53- | | 3 |
| SEQ ID NO: 273 | | 66 of SEQ ID NO: 273) | | |
| PtIP-83cmbM1-39 | SEQ ID NO: 210 | VKRLYVFTDVVVLP (a.a. 53- | | 2 |
| SEQ ID NO: 274 | | 66 of SEQ ID NO: 274) | | |
| PtIP-83cmbM1-40 | SEQ ID NO: 211 | VMHLYIFADVIELP (a.a. 53- | | 4 |
| SEQ ID NO: 275 | | 66 of SEQ ID NO: 275) | | |
| PtIP-83cmbM1-41 | SEQ ID NO: 212 | VMQLYIFCDILELP (a.a. 53- | P74T | 7 |
| SEQ ID NO: 276 | | 66 of SEQ ID NO: 276) | | |
| PtIP-83cmbM1-42 | SEQ ID NO: 213 | VMRLYIFADVVVLP (a.a. 53- | | 3 |
| SEQ ID NO: 277 | | 66 of SEQ ID NO: 277) | | |
| PtIP-83cmbM1-43 | SEQ ID NO: 214 | VMRLYIFCDVIELP (a.a. 53- | | 4 |
| SEQ ID NO: 278 | | 66 of SEQ ID NO: 278) | | |
| PtIP-83cmbM1-44 | SEQ ID NO: 215 | VMRLYVFCDIIELP (a.a. 53- | | 4 |
| SEQ ID NO: 279 | | 66 of SEQ ID NO: 279) | | |
| PtIP-83cmbM1-45 | SEQ ID NO: 216 | VMRLYVFCDILVLP (a.a. 53- | | 5 |
| SEQ ID NO: 280 | | 66 of SEQ ID NO: 280) | | |
| PtIP-83cmbM1-46 | SEQ ID NO: 217 | VMRLYVFSDIIVLP (a.a. 53- | | 5 |
| SEQ ID NO: 281 | | 66 of SEQ ID NO: 281) | | |
| PtIP-83cmbM1-47 | SEQ ID NO: 218 | VRHLYIFADIIELP (a.a. 53- | | 5 |
| SEQ ID NO: 282 | | 66 of SEQ ID NO: 282) | | |
| PtIP-83cmbM1-48 | SEQ ID NO: 219 | VRHLYIFADVVELP (a.a. 53- | | 3 |
| SEQ ID NO: 283 | | 66 of SEQ ID NO: 283) | | |
| PtIP-83cmbM1-49 | SEQ ID NO: 220 | VRHLYIFCDVIELP (a.a. 53- | | 5 |
| SEQ ID NO: 284 | | 66 of SEQ ID NO: 284) | | |
| PtIP-83cmbM1-50 | SEQ ID NO: 221 | VRHLYIFSDVIELP (a.a. 53- | | 5 |
| SEQ ID NO: 285 | | 66 of SEQ ID NO: 285) | | |
| PtIP-83cmbM1-51 | SEQ ID NO: 222 | VRHLYIFSDVVELP (a.a. 53- | | 4 |
| SEQ ID NO: 286 | | 66 of SEQ ID NO: 286) | | |
| PtIP-83cmbM1-52 | SEQ ID NO: 223 | VRHLYVFTDVLELP (a.a. 53- | | 4 |
| SEQ ID NO: 287 | | 66 of SEQ ID NO: 287) | | |
| PtIP-83cmbM1-53 | SEQ ID NO: 224 | VRQLYIFCDVIVLP (a.a. 53- | | 6 |
| SEQ ID NO: 288 | | 66 of SEQ ID NO: 288) | | |
| PtIP-83cmbM1-54 | SEQ ID NO: 225 | VRQLYIFSDVVVLP (a.a. 53- | | 5 |
| SEQ ID NO: 289 | | 66 of SEQ ID NO: 289) | | |
| PtIP-83cmbM1-55 | SEQ ID NO: 226 | VRQLYVFCDVLVLP (a.a. 53- | | 5 |
| SEQ ID NO: 290 | | 66 of SEQ ID NO: 290) | | |
| PtIP-83cmbM1-56 | SEQ ID NO: 227 | VRRLYIFADILELP (a.a. 53- | | 4 |
| SEQ ID NO: 291 | | 66 of SEQ ID NO: 291) | | |
| PtIP-83cmbM1-57 | SEQ ID NO: 228 | VRRLYIFADIVELP (a.a. 53- | P74A | 4 |
| SEQ ID NO: 292 | | 66 of SEQ ID NO: 292) | | |
| PtIP-83cmbM1-58 | SEQ ID NO: 229 | VRRLYIFGDIVELP (a.a. 53- | | 4 |
| SEQ ID NO: 293 | | 66 of SEQ ID NO: 293) | | |
| PtIP-83cmbM1-59 | SEQ ID NO: 230 | VRRLYIFTDIIELP (a.a. 53- | | 5 |
| SEQ ID NO: 294 | | 66 of SEQ ID NO: 294) | | |
| PtIP-83cmbM1-60 | SEQ ID NO: 231 | VRRLYVFADIIDLP (a.a. 53- | | 4 |
| SEQ ID NO: 295 | | 66 of SEQ ID NO: 295) | | |
| PtIP-83cmbM1-61 | SEQ ID NO: 232 | VRRLYVFADIVVLP (a.a. 53- | | 3 |
| SEQ ID NO: 296 | | 66 of SEQ ID NO: 296) | | |
| PtIP-83cmbM1-62 | SEQ ID NO: 233 | VRRLYVFCDVVVLP (a.a. 53- | | 3 |
| SEQ ID NO: 297 | | 66 of SEQ ID NO: 297) | | |
| PtIP-83cmbM1-63 | SEQ ID NO: 234 | VRRLYVFTDIIELP (a.a. 53- | | 4 |
| SEQ ID NO: 298 | | 66 of SEQ ID NO: 298) | | |
| PtIP-83cmbM1-64 | SEQ ID NO: 235 | VRRLYVFTDVLVLP (a.a. 53- | | 4 |
| SEQ ID NO: 299 | | 66 of SEQ ID NO: 299) | | |

[0490] A single combination library of Motif C containing potential mutations at positions R557, A558, K559, K561, and N562 of PtIP-83Aa (SEQ ID NO: 1) was screened. From a total of 233 variants screened from Motif C Combi, 34 active unique sequence variants were identified. Table 21 summarizes the amino acid substitutions of the resulting active PtIP-83Aa Motif C variants as compared to PtIP-83Aa.

TABLE 21

| | | | Additional | Total |
|---|---|---|---|---|
| Variants | DNA sequence | AA sequence | mutations | Mutations |
| PtIP-83Aa | SEQ ID NO: 2 | WRAKCKNVA (a.a. 556- | | 0 |
| SEQ ID NO: 1 | | 564 of SEQ ID NO: 1) | | |
| PtIP-83cmbM3-1 | SEQ ID NO: 300 | WHARCKSVA (a.a. 556- | | 3 |
| SEQ ID NO: 334 | | 564 of SEQ ID NO: 334) | | |
| PtIP-83cmbM3-2 | SEQ ID NO: 301 | WHGKCKNVA (a.a. 556- | | 2 |
| SEQ ID NO: 335 | | 564 of SEQ ID NO: 335) | | |
| PtIP-83cmbM3-3 | SEQ ID NO: 302 | WIAKCKCVA (a.a. 556- | | 2 |
| SEQ ID NO: 336 | | 564 of SEQ ID NO: 336) | | |
| PtIP-83cmbM3-4 | SEQ ID NO: 303 | WIAKCKSVA (a.a. 556- | | 2 |
| SEQ ID NO: 337 | | 564 of SEQ ID NO: 337) | | |
| PtIP-83cmbM3-5 | SEQ ID NO: 304 | WIGKCKNVA (a.a. 556- | | 2 |
| SEQ ID NO: 338 | | 564 of SEQ ID NO: 338) | | |
| PtIP-83cmbM3-6 | SEQ ID NO: 305 | WIGKCKSVA (a.a. 556- | | 3 |
| SEQ ID NO: 339 | | 564 of SEQ ID NO: 339) | | |
| PtIP-83cmbM3-7 | SEQ ID NO: 306 | WIGKCNNVA (a.a. 556- | | 3 |
| SEQ ID NO: 340 | | 564 of SEQ ID NO: 340) | | |
| PtIP-83cmbM3-8 | SEQ ID NO: 307 | WIVKCKSVA (a.a. 556- | | 3 |
| SEQ ID NO: 341 | | 564 of SEQ ID NO: 341) | | |
| PtIP-83cmbM3-9 | SEQ ID NO: 308 | WLARCKNVA (a.a. 556- | | 2 |
| SEQ ID NO: 342 | | 564 of SEQ ID NO: 342) | | |
| PtIP-83cmbM3-10 | SEQ ID NO: 309 | WLARCKSVA (a.a. 556- | | 3 |
| SEQ ID NO: 343 | | 564 of SEQ ID NO: 343) | | |
| PtIP-83cmbM3-11 | SEQ ID NO: 310 | WLGRCKNVA (a.a. 556- | | 3 |
| SEQ ID NO: 344 | | 564 of SEQ ID NO: 344) | | |
| PtIP-83cmbM3-12 | SEQ ID NO: 311 | WLGRCKSVA (a.a. 556- | | 4 |
| SEQ ID NO: 345 | | 564 of SEQ ID NO: 345) | | |
| PtIP-83cmbM3-13 | SEQ ID NO: 312 | WLVKCKCVA (a. a. 556 | | 3 |
| SEQ ID NO: 346 | | 564 of SEQ ID NO: 346) | | |
| PtIP-83cmbM3-14 | SEQ ID NO: 313 | WMAKCKNVA (a.a. 556- | A502S | 2 |
| SEQ ID NO: 347 | | 564 of SEQ ID NO: 347) | | |
| PtIP-83cmbM3-15 | SEQ ID NO: 314 | WMGRCKSVA (a.a. 556 | | 4 |
| SEQ ID NO: 348 | | 564 of SEQ ID NO: 348) | | |
| PtIP-83cmbM3-16 | SEQ ID NO: 315 | WMVKCKNVA (a.a. 556- | | 2 |
| SEQ ID NO: 349 | | 564 of SEQ ID NO: 349) | | |
| PtIP-83cmbM3-17 | SEQ ID NO: 316 | WMVKCKSVA (a.a. 556- | | 3 |
| SEQ ID NO: 350 | | 564 of SEQ ID NO: 350) | | |
| PtIP-83cmbM3-18 | SEQ ID NO: 317 | WMVRCKNVA (a.a. 556- | | 3 |
| SEQ ID NO: 351 | | 564 of SEQ ID NO: 351) | | |
| PtIP-83cmbM3-19 | SEQ ID NO: 318 | WQARCKHVA (a.a. 556- | | 3 |
| SEQ ID NO: 352 | | 564 of SEQ ID NO: 352) | | |
| PtIP-83cmbM3-20 | SEQ ID NO: 319 | WQARCKNVA (a.a. 556- | K505N | 3 |
| SEQ ID NO: 353 | | 564 of SEQ ID NO: 353) | | |
| PtIP-83cmbM3-21 | SEQ ID NO: 320 | WQGRCKNVA (a.a. 556- | | 3 |
| SEQ ID NO: 354 | | 564 of SEQ ID NO: 354) | | |
| PtIP-83cmbM3-22 | SEQ ID NO: 321 | WQVRCKSVA (a.a. 556- | | 4 |
| SEQ ID NO: 355 | | 564 of SEQ ID NO: 355) | | |
| PtIP-83cmbM3-23 | SEQ ID NO: 322 | WRARCKNVA (a.a. 556- | T573A | 2 |
| SEQ ID NO: 356 | | 564 of SEQ ID NO: 356) | | |
| PtIP-83cmbM3-24 | SEQ ID NO: 323 | WRGKCKSVA (a.a. 556- | | 2 |
| SEQ ID NO: 357 | | 564 of SEQ ID NO: 357) | | |
| PtIP-83cmbM3-25 | SEQ ID NO: 324 | WRGRCKTVA (a.a. 556- | | 3 |
| SEQ ID NO: 358 | | 564 of SEQ ID NO: 358) | | |
| PtIP-83cmbM3-26 | SEQ ID NO: 325 | WSARCKSVA (a.a. 556- | | 3 |
| SEQ ID NO: 359 | | 564 of SEQ ID NO: 359) | | |
| PtIP-83cmbM3-27 | SEQ ID NO: 326 | WSVKCKHVA (a.a. 556- | | 3 |
| SEQ ID NO: 360 | | 564 of SEQ ID NO: 360) | | |
| PtIP-83cmbM3-28 | SEQ ID NO: 327 | WTGRCKTVA (a.a. 556- | | 4 |
| SEQ ID NO: 361 | | 564 of SEQ ID NO: 361) | | |
| PtIP-83cmbM3-29 | SEQ ID NO: 328 | WTGRCNHVA (a.a. 556- | R568Q | 6 |
| SEQ ID NO: 362 | | 564 of SEQ ID NO: 362) | | |
| PtIP-83cmbM3-30 | SEQ ID NO: 329 | WTVKCKNVA (a.a. 556- | | 2 |
| SEQ ID NO: 363 | | 564 of SEQ ID NO: 363) | | |
| PtIP-83cmbM3-31 | SEQ ID NO: 330 | WTVKCKSVA (a.a. 556- | | 3 |
| SEQ ID NO: 364 | | 564 of SEQ ID NO: 364) | | |
| PtIP-83cmbM3-32 | SEQ ID NO: 331 | WTVRCKNVA (a.a. 556- | | 3 |
| SEQ ID NO: 365 | | 564 of SEQ ID NO: 365) | | |
| PtIP-83cmbM3-33 | SEQ ID NO: 332 | WRARCKHVA (a.a. 556- | | 2 |
| SEQ ID NO: 366 | | 564 of SEQ ID NO: 366) | | |
| PtIP-83cmbM3-34 | SEQ ID NO: 333 | WIGRCKSVA (a.a. 556- | | 4 |
| SEQ ID NO: 367 | | 564 of SEQ ID NO: 367) | | |

### Example 13—PtIP-83Aa Variants with Multiple Amino Acid Substitutions in Motif A and Motif C

[0491] Additional sequence diversity was created by combining active Motif A combinations with active Motif C combinations. Twenty four unique active Motif A combination variants and 11 unique active Motif C combination variants were selected for construction of a Motif A×Motif C Library (Table 22).

TABLE 22
Sequence variants used for construction of Motif A x Motif C
Combination Library

| Motif A | | Motif C |
|---|---|---|
| PtIP-83cmbM1-1 | PtIP-83cmbM1-32 | PtIP-83cmbM3-2 |
| SEQ ID NO: 236 | SEQ ID NO: 267 | SEQ ID NO: 335 |
| PtIP-83cmbM1-2 | PtIP-83cmbM1-35 | PtIP-83cmbM3-5 |
| SEQ ID NO: 237 | SEQ ID NO: 270 | SEQ ID NO: 338 |
| PtIP-83cmbM1-4 | PtIP-83cmbM1-36 | PtIP-83cmbM3-9 |
| SEQ ID NO: 239 | SEQ ID NO: 271 | SEQ ID NO: 342 |
| PtIP-83cmbM1-6 | PtIP-83cmbM1-37 | PtIP-83cmbM3-11 |
| SEQ ID NO: 241 | SEQ ID NO: 272 | SEQ ID NO: 344 |
| PtIP-83cmbM1-12 | PtIP-83cmbM1-44 | PtIP-83cmbM3-16 |
| SEQ ID NO: 247 | SEQ ID NO: 279 | SEQ ID NO: 349 |
| PtIP-83cmbM1-15 | PtIP-83cmbM1-49 | PtIP-83cmbM3-19 |
| SEQ ID NO: 250 | SEQ ID NO: 284 | SEQ ID NO: 352 |
| PtIP-83cmbM1-16 | PtIP-83cmbM1-51 | PtIP-83cmbM3-20 |
| SEQ ID NO: 251 | SEQ ID NO: 286 | SEQ ID NO: 353 |
| PtIP-83cmbM1-18 | PtIP-83cmbM1-55 | PtIP-83cmbM3-23 |
| SEQ ID NO: 253 | SEQ ID NO: 290 | SEQ ID NO: 356 |
| PtIP-83cmbM1-21 | PtIP-83cmbM1-56 | PtIP-83cmbM3-24 |
| SEQ ID NO: 256 | SEQ ID NO: 291 | SEQ ID NO: 357 |
| PtIP-83cmbM1-22 | PtIP-83cmbM1-60 | PtIP-83cmbM3-25 |
| SEQ ID NO: 257 | SEQ ID NO: 295 | SEQ ID NO: 358 |
| PtIP-83cmbM1-30 | PtIP-83cmbM1-62 | PtIP-83cmbM3-30 |
| SEQ ID NO: 265 | SEQ ID NO: 297 | SEQ ID NO: 363 |
| PtIP-83cmbM1-31 | PtIP-83cmbM1-64 | |
| SEQ ID NO: 266 | SEQ ID NO: 299 | |

[0492] Plasmid DNA was isolated from these variants and pooled by motif. Motif A combinations were PCR amplified from the Motif A pool using the following primers: AATCTCTCATCTAAGAGGCTGGATCCTAGGATGGCTCTCGTGGATTACGGC (SEQ ID NO: 630) and GCAGCCACAACCTCCATCACAGC (SEQ ID NO: 631). Motif C combinations were PCR amplified from the Motif C pool using the following primers: TGGCCAATCCAGAAGATGGACAAGTCTAGACTACTCTTCGTCGTGCCGCCAG (SEQ ID NO: 632) and GCTGTGATGGAGGTTGTGGCTGC (SEQ ID NO: 633). The two PCR products were then assembled by multi-PCR fragments overlap (Gibson Assembly Cloning Kit, New England Biolabs Inc) into a plant transient vector containing the viral DMMV promoter. 94 variants from this library were screened by plant transient expression and SBL activity assay as described in Example 4. 30 unique active variants, defined as having an average activity score of <=60% of leaf disk eaten, were identified by sequencing. Table 23 summarizes the amino acid substitutions of the resulting active PtIP-83Aa Motif A×Motif C variants as compared to PtIP-83Aa.

TABLE 23

| | | | Motif C | Add. | Total |
|---|---|---|---|---|---|
| Variant | DNA sequence | Motif A sequence | sequence | Mut. | Mut. |
| PtIP-83Aa | SEQ ID NO: 2 | VKRLYVFADVVELP | WRAKCKNVA | | 0 |
| SEQ ID NO: 1 | | (a.a. 53-66 of | (a.a. 556 | | |
| | | SEQ ID NO: 1) | 564 of SEQ ID | | |
| | | | NO: 1) | | |
| PtIP-83cmbM1xM3-1 | SEQ ID NO: 368 | VKHLYIFTDVLELP | WHGKCKNVA | S533F | 7 |
| SEQ ID NO: 398 | | (a.a. 53-66 of | (a.a. 556- | | |
| | | SEQ ID NO: 398) | 564 of SEQ ID | | |
| | | | NO: 398) | | |
| PtIP-83cmbM1xM3-2 | SEQ ID NO: 369 | VKHLYIFTDVLELP | WLARCKNVA | | 6 |
| SEQ ID NO: 399 | | (a.a. 53-66 of | (a.a. 556- | | |
| | | SEQ ID NO: 399) | 564 of SEQ ID | | |
| | | | NO: 399) | | |
| PtIP-83cmbM1xM3-3 | SEQ ID NO: 370 | VKHLYIFTDVLELP | WQARCKHVA | | 7 |
| SEQ ID NO: 400 | | (a.a. 53-66 of | (a.a. 556- | | |
| | | SEQ ID NO: 400) | 564 of SEQ ID | | |
| | | | NO: 400) | | |
| PtIP-83cmbM1xM3-4 | SEQ ID NO: 371 | VKHLYVFADVIELP | WQARCKHVA | | 5 |
| SEQ ID NO: 401 | | (a.a. 53-66 of | (a.a. 556- | | |
| | | SEQ ID NO: 401) | 564 of SEQ ID | | |
| | | | NO: 401) | | |
| PtIP-83cmbM1xM3-5 | SEQ ID NO: 372 | VKHLYVFADVIELP | WRARCKNVA | | 3 |
| SEQ ID NO: 402 | | (a.a. 53-66 of | (a.a. 556- | | |
| | | SEQ ID NO: 402) | 564 of SEQ ID | | |
| | | | NO: 402) | | |
| PtIP-83cmbM1xM3-6 | SEQ ID NO: 373 | VKQLYIFCDVLELP | WQARCKNVA | | 6 |
| SEQ ID NO: 403 | | (a.a. 53-66 of | (a.a. 556- | | |
| | | SEQ ID NO: 403) | 564 of SEQ ID | | |
| | | | NO: 403) | | |
| PtIP-83cmbM1xM3-7 | SEQ ID NO: 374 | VKRFYIFADIVELP | WIGKCKNVA | | 5 |
| SEQ ID NO: 404 | | (a.a. 53-66 of | (a.a. 556- | | |
| | | SEQ ID NO: 404) | 564 of SEQ ID | | |
| | | | NO: 404) | | |
| PtIP-83cmbM1xM3-8 | SEQ ID NO: 375 | VKRFYIFADIVELP | WTVKCKNVA | | 5 |
| SEQ ID NO: 405 | | (a.a. 53-66 of | (a.a. 556- | | |
| | | SEQ ID NO: 405) | 564 of SEQ ID | | |
| | | | NO: 405) | | |
| PtIP-83cmbM1xM3-9 | SEQ ID NO: 376 | VKRLYIFADIIELP | WMVKCKNVA | | 5 |
| SEQ ID NO: 406 | | (a.a. 53-66 of | (a.a. 556- | | |
| | | SEQ ID NO: 406) | 564 of SEQ ID | | |
| | | | NO: 406) | | |
| PtIP-83cmbM1xM3-10 | SEQ ID NO: 377 | VKRLYIFADIIELP | WQARCKNVA | | 5 |
| SEQ ID NO: 407 | | (a.a. 53-66 of | (a.a. 556- | | |
| | | SEQ ID NO: 407) | 564 of SEQ ID | | |
| | | | NO: 407) | | |
| PtIP-83cmbM1xM3-11 | SEQ ID NO: 378 | VKRLYIFADIIELP | WRGKCKSVA | K52E, | 7 |
| SEQ ID NO: 408 | | (a.a. 53-66 of | (a.a. 556- | K505N | |
| | | SEQ ID NO: 408) | 564 of SEQ ID | | |
| | | | NO: 408) | | |
| PtIP-83cmbM1xM3-12 | SEQ ID NO: 379 | VKRLYIFADIIELP | WRGRCKTVA | | 6 |
| SEQ ID NO: 409 | | (a.a. 53-66 of | (a.a. 556- | | |
| | | SEQ ID NO: 409) | 564 of SEQ ID | | |
| | | | NO: 409) | | |
| PtIP-83cmbM1xM3-13 | SEQ ID NO: 380 | VKRLYIFTDVIELP | WIGKCKNVA | | 5 |
| SEQ ID NO: 410 | | (a.a. 53-66 of | (a.a. 556- | | |
| | | SEQ ID NO: 410) | 564 of SEQ ID | | |
| | | | NO: 410) | | |
| PtIP-83cmbM1xM3-14 | SEQ ID NO: 381 | VKRLYVFCDIIELP | WLARCKNVA | | 5 |
| SEQ ID NO: 411 | | (a.a. 53-66 of | (a.a. 556- | | |
| | | SEQ ID NO: 411) | 564 of SEQ ID | | |
| | | | NO: 411) | | |
| PtIP-83cmbM1xM3-15 | SEQ ID NO: 382 | VKRLYVFSDIIELP | WIGKCKNVA | | 5 |
| SEQ ID NO: 412 | | (a.a. 53-66 of | (a.a. 556- | | |
| | | SEQ ID NO: 412) | 564 of SEQ ID | | |
| | | | NO: 412) | | |
| PtIP-83cmbM1xM3-16 | SEQ ID NO: 383 | VKRLYVFSDIIELP | WRGRCKTVA | | 6 |
| SEQ ID NO: 413 | | (a.a. 53-66 of | (a.a. 556- | | |
| | | SEQ ID NO: 413) | 564 of SEQ ID | | |
| | | | NO: 413) | | |
| PtIP-83cmbM1xM3-17 | SEQ ID NO: 384 | VKRLYVFSDVIELP | WRGKCKSVA | | 4 |
| SEQ ID NO: 414 | | (a.a. 53-66 of | (a.a. 556- | | |
| | | SEQ ID NO: 414) | 564 of SEQ ID | | |
| | | | NO: 414) | | |
| PtIP-83cmbM1xM3-18 | SEQ ID NO: 385 | VKRLYVFSDVIELP | WRVKCKNVA | | 3 |
| SEQ ID NO: 415 | | (a.a. 53-66 of | (a.a. 556- | | |
| | | SEQ ID NO: 415) | 564 of SEQ ID | | |
| | | | NO: 415) | | |
| PtIP-83cmbM1xM3-19 | SEQ ID NO: 386 | VMRLYIFADVVELP | WRGKCKSVA | | 4 |
| SEQ ID NO: 416 | | (a.a. 53-66 of | (a.a. 556- | | |
| | | SEQ ID NO: 416) | 564 of SEQ ID | | |
| | | | NO: 416) | | |
| PtIP-83cmbM1xM3-20 | SEQ ID NO: 387 | VRHLYIFCDVIELP | WIGKCKNVA | | 7 |
| SEQ ID NO: 417 | | (a.a. 53-66 of | (a.a. 556- | | |
| | | SEQ ID NO: 417) | 564 of SEQ ID | | |
| | | | NO: 417) | | |
| PtIP-83cmbM1xM3-21 | SEQ ID NO: 388 | VRHLYIFSDVVELP | WMVKCKNVA | | 6 |
| SEQ ID NO: 418 | | (a.a. 53-66 of | (a.a. 556- | | |
| | | SEQ ID NO: 418) | 564 of SEQ ID | | |
| | | | NO: 418) | | |
| PtIP-83cmbM1xM3-22 | SEQ ID NO: 389 | VRHLYIFSDVVELP | WRGKCKSVA | K505N | 7 |
| SEQ ID NO: 419 | | (a.a. 53-66 of | (a.a. 556- | | |
| | | SEQ ID NO: 419) | 564 of SEQ ID | | |
| | | | NO: 419) | | |
| PtIP-83cmbM1xM3-23 | SEQ ID NO: 390 | VRQLYVFCDVLVLP | WHGKCKNVA | | 7 |
| SEQ ID NO: 420 | | (a.a. 53-66 of | (a.a. 556- | | |
| | | SEQ ID NO: 420) | 564 of SEQ ID | | |
| | | | NO: 420) | | |
| PtIP-83cmbM1xM3-24 | SEQ ID NO: 391 | VRQLYVFCDVLVLP | WLGRCKNVA | | 8 |
| SEQ ID NO: 421 | | (a.a. 53-66 of | (a.a. 556- | | |
| | | SEQ ID NO: 421) | 564 of SEQ ID | | |
| | | | NO: 421) | | |
| PtIP-83cmbM1xM3-25 | SEQ ID NO: 392 | VRQLYVFCDVLVLP | WRGKCKSVA | M1I | 8 |
| SEQ ID NO: 422 | | (a.a. 53-66 of | (a.a. 556- | | |
| | | SEQ ID NO: 422) | 564 of SEQ ID | | |
| | | | NO: 422) | | |
| PtIP-83cmbM1xM3-26 | SEQ ID NO: 393 | VRRLYIFADILELP | WMVKCKNVA | | 6 |
| SEQ ID NO: 423 | | (a.a. 53-66 of | (a.a. 556- | | |
| | | SEQ ID NO: 423) | 564 of SEQ ID | | |
| | | | NO: 423) | | |
| PtIP-83cmbM1xM3-27 | SEQ ID NO: 394 | VRRLYVFCDVVVLP | WRARCKNVA | | 4 |
| SEQ ID NO: 424 | | (a.a. 53-66 of | (a.a. 556- | | |
| | | SEQ ID NO: 424) | 564 of SEQ ID | | |
| | | | NO: 424) | | |
| PtIP-83cmbM1xM3-28 | SEQ ID NO: 395 | VRRLYVFTDVLVLP | WIGKCKNVA | | 6 |
| SEQ ID NO: 425 | | (a.a. 53-66 of | (a.a. 556- | | |
| | | SEQ ID NO: 425) | 564 of SEQ ID | | |
| | | | NO: 425) | | |
| PtIP-83cmbM1xM3-29 | SEQ ID NO: 396 | VRRLYVFTDVLVLP | WRARCKNVA | | 5 |
| SEQ ID NO: 426 | | (a.a. 53-66 of | (a.a. 556- | | |
| | | SEQ ID NO: 426) | 564 of SEQ ID | | |
| | | | NO: 426) | | |
| PtIP-83cmbM1xM3-30 | SEQ ID NO: 397 | VRRLYVFTDVLVLP | WTVKCKNVA | | 6 |
| SEQ ID NO: 427 | | (a.a. 53-66 of | (a.a. 556- | | |
| | | SEQ ID NO: 427) | 564 of SEQ ID | | |
| | | | NO: 427) | | |

### Example 14 PtIP-83Aa Variants with Multiple Amino Acid Substitutions

[0493] To create variants of PtIP-83Aa (SEQ ID NO: 1) with multiple amino acid changes, variant libraries were generated by family shuffling (Chia-Chun J. Chang et al, 1999, Nature Biotechnology 17, 793-797) of the polynucleotide (SEQ ID NO: 2) encoding PtIP-83Aa (SEQ ID NO: 1) and the polynucleotide (SEQ ID NO: 2) encoding PtIP-83Cb (SEQ ID NO: 7). Mutation rates of the libraries were controlled by varying the regions of PtIP-83Aa (SEQ ID NO: 1) and PtIP-83Cb (SEQ ID NO: 7) which were included in the shuffling library reaction. Five libraries were generated between the two variants. In the first library (83FS-1), the full length gene sequence from both PtIP-83Aa (SEQ ID NO: 2) and PtIP-83Cb (SEQ ID NO: 8) were included in the shuffling reaction. In the second library (83FS-2), fragments containing nt: 1114-2604 of SEQ ID NO: 2 (encoding PtIP-83Aa (SEQ ID NO: 1)) and nt: 1072-2559 of SEQ ID NO: 8 (encoding PtIP-83Cb (SEQ ID NO: 7)) were shuffled. The shuffled fragments were then combined with nt: 1-1113 of SEQ ID NO: 2 (encoding PtIP-83Aa (SEQ ID NO: 1)) by Gibson Assembly (New England Biolabs). In a third library (83FS-3), the 5′ and 3′ regions of the two variants were shuffled in separate reactions. The 5′ reaction, containing shuffled fragments from nt: 1-1113 of SEQ ID NO: 2 (encoding PtIP-83Aa (SEQ ID NO: 1)) and nt:1-1071 of SEQ ID NO: 8 (encoding PtIP-83Cb (SEQ ID NO: 7)), and the 3′ reaction, containing shuffled fragments from nt: 1114-2604 of SEQ ID NO: 2 (encoding PtIP-83Aa (SEQ ID NO: 1)) and nt: 1072-2559 of SEQ ID NO: 8 (encoding PtIP-83Cb (SEQ ID NO: 7)), were then combined by Gibson Assembly. In a fourth library (83FS-4), fragments from the 5′ region of each variant (nt: 1-1113 of SEQ ID NO: 2 (encoding PtIP-83Aa (SEQ ID NO: 1)) and nt:1-1071 of SEQ ID NO: 8 (encoding PtIP-83Cb (SEQ ID NO: 7)) were shuffled with additional primers spiked into the assembly reaction to promote crossovers between the two variants. The shuffled 5′ region was then combined by Gibson assembly with the 3′ region of either SEQ ID NO: 2 (encoding PtIP-83Aa (SEQ ID NO: 1)) or SEQ ID NO: 8 (encoding PtIP-83Cb (SEQ ID NO: 7)). In the fifth library (83FS-5), single crossover variants were generated manually between SEQ ID NO: 2 (encoding PtIP-83Aa (SEQ ID NO: 1)) and SEQ ID NO: 8 (encoding PtIP-83Cb (SEQ ID NO: 7)) using Gibson assembly.

[0494] All shuffled libraries were cloned into a plant transient expression vector containing the viral dMMV promoter for subsequent transient expression in bush bean and SBL activity assays as described in Example 4. Active variants, defined as having an average activity score of ≤60% of leaf disk eaten, were sent for sequence identification. In library 83FS-1, 197 variants were screened and 45 active unique variants were sequence identified. In library 83FS-2, 96 variants were screened and 32 active unique variants were sequence identified. In library 83FS-3, 192 variants were screened and 13 active unique variants were sequence identified. In library 83FS-4, 96 variants were screened and 6 unique active variants were sequence identified. In library 83FS-5, four of the eleven constructed single cross variants were found to be active.

[0495] Sequence identity of active variants to PtIP-83Aa was calculated using the Needleman-Wunsch algorithm, as implemented in the Needle program (EMBOSS tool suite). The percent identity compared to PtIP-83Aa (SEQ ID NO: 1), variant designation, nucleotide sequences, and amino acid sequences of the resulting active PtIP-83Aa polypeptide variants from all libraries are summarized in Table 24. Table 25 summarizes the % identity of the active variants compared to PtIP-83Aa (SEQ ID NO: 1), the number of variants with each % identity, and the variant identification.

TABLE 24

| % Identity to | | | |
|---|---|---|---|
| PtIP-83Aa (SEQ | | | |
| ID NO: 1) | Variant | Polynucleotide | Polypeptide |
| 76 | S04359885 | SEQ ID NO: 428 | SEQ ID NO: 518 |
| 76 | S04359888 | SEQ ID NO: 429 | SEQ ID NO: 519 |
| 73 | S04359896 | SEQ ID NO: 430 | SEQ ID NO: 520 |
| 73 | S04359899 | SEQ ID NO: 431 | SEQ ID NO: 521 |
| 77 | S04359902 | SEQ ID NO: 432 | SEQ ID NO: 522 |
| 76 | S04359909 | SEQ ID NO: 433 | SEQ ID NO: 523 |
| 77 | S04359911 | SEQ ID NO: 434 | SEQ ID NO: 524 |
| 75 | S04359942 | SEQ ID NO: 435 | SEQ ID NO: 525 |
| 74 | S04359944 | SEQ ID NO: 436 | SEQ ID NO: 526 |
| 73 | S04359948 | SEQ ID NO: 437 | SEQ ID NO: 527 |
| 81 | S04359951 | SEQ ID NO: 438 | SEQ ID NO: 528 |
| 80 | S04359988 | SEQ ID NO: 439 | SEQ ID NO: 529 |
| 81 | S04359991 | SEQ ID NO: 440 | SEQ ID NO: 530 |
| 77 | S04360034 | SEQ ID NO: 441 | SEQ ID NO: 531 |
| 76 | S04360059 | SEQ ID NO: 442 | SEQ ID NO: 532 |
| 73 | S04360064 | SEQ ID NO: 443 | SEQ ID NO: 533 |
| 73 | S04360087 | SEQ ID NO: 444 | SEQ ID NO: 534 |
| 73 | S04360095 | SEQ ID NO: 445 | SEQ ID NO: 535 |
| 77 | S04360104 | SEQ ID NO: 446 | SEQ ID NO: 536 |
| 74 | S04360110 | SEQ ID NO: 447 | SEQ ID NO: 537 |
| 77 | S04360119 | SEQ ID NO: 448 | SEQ ID NO: 538 |
| 73 | S04360122 | SEQ ID NO: 449 | SEQ ID NO: 539 |
| 75 | S04360130 | SEQ ID NO: 450 | SEQ ID NO: 540 |
| 78 | S04360132 | SEQ ID NO: 451 | SEQ ID NO: 541 |
| 93 | S04360136 | SEQ ID NO: 452 | SEQ ID NO: 542 |
| 93 | S04360141 | SEQ ID NO: 453 | SEQ ID NO: 543 |
| 77 | S04360143 | SEQ ID NO: 454 | SEQ ID NO: 544 |
| 76 | S04360146 | SEQ ID NO: 455 | SEQ ID NO: 545 |
| 75 | S04360160 | SEQ ID NO: 456 | SEQ ID NO: 546 |
| 79 | S04360435 | SEQ ID NO: 457 | SEQ ID NO: 547 |
| 77 | S04360466 | SEQ ID NO: 458 | SEQ ID NO: 548 |
| 77 | S04360467 | SEQ ID NO: 459 | SEQ ID NO: 549 |
| 73 | S04360469 | SEQ ID NO: 460 | SEQ ID NO: 550 |
| 78 | S04360485 | SEQ ID NO: 461 | SEQ ID NO: 551 |
| 80 | S04360504 | SEQ ID NO: 462 | SEQ ID NO: 552 |
| 76 | S04360545 | SEQ ID NO: 463 | SEQ ID NO: 553 |
| 77 | S04360574 | SEQ ID NO: 464 | SEQ ID NO: 554 |
| 76 | S04360579 | SEQ ID NO: 465 | SEQ ID NO: 555 |
| 74 | S04360592 | SEQ ID NO: 466 | SEQ ID NO: 556 |
| 79 | S04360619 | SEQ ID NO: 467 | SEQ ID NO: 557 |
| 77 | S04360626 | SEQ ID NO: 468 | SEQ ID NO: 558 |
| 77 | S04360660 | SEQ ID NO: 469 | SEQ ID NO: 559 |
| 78 | S04360664 | SEQ ID NO: 470 | SEQ ID NO: 560 |
| 77 | S04360699 | SEQ ID NO: 471 | SEQ ID NO: 561 |
| 76 | S04360787 | SEQ ID NO: 472 | SEQ ID NO: 562 |
| 99 | S04363576 | SEQ ID NO: 473 | SEQ ID NO: 563 |
| 97 | S04363577 | SEQ ID NO: 474 | SEQ ID NO: 564 |
| 95 | S04363578 | SEQ ID NO: 475 | SEQ ID NO: 565 |
| 97 | S04363579 | SEQ ID NO: 476 | SEQ ID NO: 566 |
| 97 | S04363580 | SEQ ID NO: 477 | SEQ ID NO: 567 |
| 95 | S04363584 | SEQ ID NO: 478 | SEQ ID NO: 568 |
| 97 | S04363585 | SEQ ID NO: 479 | SEQ ID NO: 569 |
| 96 | S04363587 | SEQ ID NO: 480 | SEQ ID NO: 570 |
| 96 | S04363588 | SEQ ID NO: 481 | SEQ ID NO: 571 |
| 97 | S04363593 | SEQ ID NO: 482 | SEQ ID NO: 572 |
| 95 | S04363594 | SEQ ID NO: 483 | SEQ ID NO: 573 |
| 96 | S04363600 | SEQ ID NO: 484 | SEQ ID NO: 574 |
| 97 | S04363605 | SEQ ID NO: 485 | SEQ ID NO: 575 |
| 96 | S04363608 | SEQ ID NO: 486 | SEQ ID NO: 576 |
| 96 | S04363609 | SEQ ID NO: 487 | SEQ ID NO: 577 |
| 97 | S04363612 | SEQ ID NO: 488 | SEQ ID NO: 578 |
| 94 | S04363619 | SEQ ID NO: 489 | SEQ ID NO: 579 |
| 97 | S04363623 | SEQ ID NO: 490 | SEQ ID NO: 580 |
| 94 | S04363625 | SEQ ID NO: 491 | SEQ ID NO: 581 |
| 93 | S04363626 | SEQ ID NO: 492 | SEQ ID NO: 582 |
| 97 | S04363629 | SEQ ID NO: 493 | SEQ ID NO: 583 |
| 96 | S04363631 | SEQ ID NO: 494 | SEQ ID NO: 584 |
| 95 | S04363632 | SEQ ID NO: 495 | SEQ ID NO: 585 |
| 94 | S04363638 | SEQ ID NO: 496 | SEQ ID NO: 586 |
| 98 | S04363643 | SEQ ID NO: 497 | SEQ ID NO: 587 |
| 97 | S04363644 | SEQ ID NO: 498 | SEQ ID NO: 588 |
| 97 | S04363646 | SEQ ID NO: 499 | SEQ ID NO: 589 |
| 95 | S04363648 | SEQ ID NO: 500 | SEQ ID NO: 590 |
| 96 | S04363659 | SEQ ID NO: 501 | SEQ ID NO: 591 |
| 94 | S04363660 | SEQ ID NO: 502 | SEQ ID NO: 592 |
| 96 | S04363662 | SEQ ID NO: 503 | SEQ ID NO: 593 |
| 97 | S04363663 | SEQ ID NO: 504 | SEQ ID NO: 594 |
| 64 | S04367796 | SEQ ID NO: 505 | SEQ ID NO: 595 |
| 83 | S04367808 | SEQ ID NO: 506 | SEQ ID NO: 596 |
| 76 | S04367849 | SEQ ID NO: 507 | SEQ ID NO: 597 |
| 78 | S04367850 | SEQ ID NO: 508 | SEQ ID NO: 598 |
| 80 | S04367851 | SEQ ID NO: 509 | SEQ ID NO: 599 |
| 78 | S04367860 | SEQ ID NO: 510 | SEQ ID NO: 600 |
| 77 | S04367872 | SEQ ID NO: 511 | SEQ ID NO: 601 |
| 77 | S04367882 | SEQ ID NO: 512 | SEQ ID NO: 602 |
| 79 | S04367903 | SEQ ID NO: 513 | SEQ ID NO: 603 |
| 78 | S04367917 | SEQ ID NO: 514 | SEQ ID NO: 604 |
| 78 | S04367945 | SEQ ID NO: 515 | SEQ ID NO: 605 |
| 80 | S04367977 | SEQ ID NO: 516 | SEQ ID NO: 606 |
| 78 | S04367983 | SEQ ID NO: 517 | SEQ ID NO: 607 |
| 87 | S04371015 | SEQ ID NO: 718 | SEQ ID NO: 728 |
| 88 | S04371039 | SEQ ID NO: 719 | SEQ ID NO: 729 |
| 84 | S04371062 | SEQ ID NO: 720 | SEQ ID NO: 730 |
| 86 | S04371086 | SEQ ID NO: 721 | SEQ ID NO: 731 |
| 73 | S04382521 | SEQ ID NO: 722 | SEQ ID NO: 732 |
| 84 | S04382532 | SEQ ID NO: 723 | SEQ ID NO: 733 |
| 98 | S04382574 | SEQ ID NO: 724 | SEQ ID NO: 734 |
| 88 | S04382581 | SEQ ID NO: 725 | SEQ ID NO: 735 |
| 89 | S04382591 | SEQ ID NO: 726 | SEQ ID NO: 736 |
| 87 | S04382601 | SEQ ID NO: 727 | SEQ ID NO: 737 |

TABLE 25

| % Identity to | | |
|---|---|---|
| PtIP-83Aa | | |
| (SEQ ID NO: 1) | # variants | Variants |
| 99 | 1 | S04363576 |
| 98 | 2 | S04363643, S04382574 |
| 97 | 12 | S04363646, S04363629, S04363612, S04363663, S04363585, |
| | | S04363580, S04363623, S04363579, S04363605, S04363644, |
| | | S04363593, S04363577 |
| 96 | 8 | S04363662, S04363587, S04363631, S04363659, S04363608, |
| | | S04363600, S04363588, S04363609 |
| 95 | 5 | S04363648, S04363632, S04363584, S04363594, S04363578 |
| 94 | 4 | S04363660, S04363619, S04363625, S04363638 |
| 93 | 3 | S04363626, S04360136, S04360141 |
| 89 | 1 | S04382591 |
| 88 | 2 | S04371039, S04382581 |
| 87 | 2 | S04371015, S04382601 |
| 86 | 1 | S04371086 |
| 84 | 2 | S04371062, S04382532 |
| 83 | 1 | S04367808 |
| 81 | 2 | S04359951, S04359991 |
| 80 | 4 | S04360504, S04367851, S04367977, S04359988 |
| 79 | 3 | S04367903, S04360435, S04360619 |
| 78 | 8 | S04367983, S04367945, S04367850, S04360485, S04367917, |
| | | S04360664, S04360132, S04367860 |
| 77 | 14 | S04367872, S04360467, S04360119, S04367882, S04360104, |
| | | S04360626, S04359902, S04360143, S04359911, S04360034, |
| | | S04360660, S04360574, S04360466, S04360699 |
| 76 | 9 | S04359909, S04360787, S04359888, S04359885, S04360579, |
| | | S04360146, S04360059, S04367849, S04360545 |
| 75 | 3 | S04359942, S04360130, S04360160 |
| 74 | 3 | S04360592, S04360110, S04359944 |
| 73 | 9 | S04359896, S04360122, S04360469, S04360087, S04359899, |
| | | S04360064, S04360095, S04359948, S04382521 |
| 64 | 1 | S04367796 |

### Example 14 Specific Binding of Certain PtIP-83 Proteins to Insect Brush Border Membrane Vesicle (BBMV) and Heterologous Competition Binding Studies

[0496] Insect midguts were isolated from fourth instar insects by making a longitudinal incision through the cuticle along the dorsal side of the larvae. Midguts were opened to remove the peritrophic membrane and food bolus and separated from the carcass. Isolated guts were cleaned of fat bodies and other non-midgut tissues and immediately flash frozen in liquid nitrogen for storage at −80° C. until needed. Brush border membrane vesicles (BBMVs) were prepared from stored midgut tissue essentially as described in Wolfersberger, M. et al. (Comp Bioch Physiol (1987)). Protein levels were quantified by the colorimetric bicinchoninic acid (BCA) method (Pierce, Rockland, IL, USA). BBMV quantities were based on these protein determinations. Aminopeptidase N activity was measured and used as an indicator of apical membrane enrichment during BBMV preparation. The assay measured the hydrolysis of the artificial substrate 1 mM L-leucine-p-nitroanilide (Sigma Aldrich, St. louis, MO) when mixed with tissue samples in buffer consisting of 25 mM NaCl and 10 mM Tris-HCl, pH 8.0, by tracking change in absorbance at 405 nm in a 96-well plate reader (Molecular Devices, Sunnyvale, CA). In preparation for binding and competition, PtIP-83Aa (SEQ ID NO: 1) and PtIP-83Cb (SEQ ID NO: 7) proteins were dialyzed overnight at 4° C. in binding buffer which consisted of 20 mM Na₂CO₃, 20 mM NaHCO₃, pH 9.6, 100 mM NaCl and 0.2% Tween-20®. To track specific binding, each protein was labeled with the fluorescent indicator Alexa Fluor®488 (Thermo Fisher Scientific) according to manufacturer's instructions. Conditions for measuring specific binding were optimized by varying the amount of BBMVs and concentration of labeled protein while testing the competition caused by a molar excess of unlabeled protein. Optimal conditions were determined for each protein/insect combination as follows: 10 nM Alexa-PtIP-83Aa and 30 μg CEW BBMVs; 4 nM Alexa-PtIP-83Aa and 20 μg FAW BBMVs; 20 nM Alexa-PtIP-83Cb and 30 μg CEW or FAW BBMVs. Binding assays consisted of mixing an optimal amount of BBMVs and labeled protein in 100 microliters of binding buffer in the absence and presence of different concentrations of unlabeled protein. The mixtures were incubated at 25° C. for 1 hour while maintaining constant agitation using a high velocity orbital shaker. Following the incubation, ice cold binding buffer (1.0 ml) was added to each reaction and the BBMVs with bound proteins were collected by centrifugation (10 min at 20,000 g) at 4° C. to separate unbound proteins. The BBMV pellet was then washed again with 1.0 ml of ice cold binding buffer with centrifugation (10 min, 20000 g). The final BBMV pellet was then suspended in LDS sample buffer with reducing reagent (Nupage®, ThermoFisher Scientific), boiled for 5 minutes and subjected to SDS-PAGE (Novex NuPage® 4-12% Bis-Tris gel using MOPS running buffer (Thermo Fisher Scientific)). Upon completion of electrophoresis, Alexa-labeled toxins were detected as fluorescent bands within the gels. The gel image was captured electronically using a digital imaging system (LAS-4010, GE Healthcare). Densitometry measurements of gel images were used to quantify the binding of the labeled toxins using molecular imaging software (TotalLab, Newcastle, UK). EC₅₀ values (defined as the concentration of unlabeled protein that reduced the specific binding of the labeled protein by 50%) were determined to approximate the binding affinity for each protein. The EC₅₀ values were measured by incubating BBMVs with the labeled protein in the absence and presence of increasing concentrations of unlabeled protein (homologous competition) until maximal reduction in specific binding was achieved. Densitometry values were fit to a logistic equation using OriginPro 2015 (Originlab, Northampton, MA, USA) to determine the point of 50% reduction. For heterologous competition evaluations, optimal binding conditions for the labeled protein were used and were tested at a saturating concentration of the competing unlabeled protein. The binding signals measured in the presence of unlabeled protein were normalized to the signal measured for labeled protein alone. Values from replicates were averaged and specific binding was calculated by subtracting the nonspecific binding signal. PtIP-83Aa (SEQ ID NO: 1) and PtIP-83Cb (SEQ ID NO: 7) share about 71% protein sequence identity. Heterologous competitive binding experiments performed using Corn Earworm (CEW) BBMVs showed no significant competition in either direction between these two proteins indicating they recognize different target sites from each other (FIG. 6). Similar results were obtained with BBMVs prepared from Fall Army Worm (FAW) and Soybean Looper (SBL). Further heterologous competitive binding experiments showed that PtIP-83Aa (SEQ ID NO: 1) and I PtIP-83Gb (SEQ ID NO: 798) also showed no significant competition in either direction between these two proteins indicating they recognize different target sites from each other. Table 26 represents the results of all heterologous competitive binding experiments performed.

TABLE 26
Heterologous Competition Binding Results

| Labeled Protein | Unlabeled Protein | CEW | SBL | FAW |
|---|---|---|---|---|
| PtIP-83Aa (SEQ ID NO: 1) | PtIP-83Cb (SEQ | No | No | No |
| | ID NO: 7) | | | |
| PtIP-83Cb (SEQ ID NO: 7) | PtIP-83Aa (SEQ | No | No | No |
| | ID NO: 1) | | | |
| PtIP-83Aa (SEQ ID NO: 1) | PtIP-83Gb (SEQ | No | NT | No |
| | ID NO: 798) | | | |
| PtIP-83Gb (SEQ ID NO: | PtIP-83Aa (SEQ | No | NTf4c | No |
| 798) | ID NO: 1) | | | |
| PtIP-83Cb (SEQ ID NO: 7) | PtIP-83Gb (SEQ | Yes | NT | NT |
| | ID NO: 798) | | | |
| PtIP-83Gb (SEQ ID NO: | PtIP-83Cb (SEQ | Yes | NT | NT |
| 798) | ID NO: 7) | | | |

*Yes—binding sites are shared in heterologous competition binding assay;
No—binding sites are not shared in heterologous binding assay;
NT—Not tested

[0497] The above description of various illustrated embodiments of the disclosure is not intended to be exhaustive or to limit the scope to the precise form disclosed. While specific embodiments of and examples are described herein for illustrative purposes, various equivalent modifications are possible within the scope of the disclosure, as those skilled in the relevant art will recognize. The teachings provided herein can be applied to other purposes, other than the examples described above. Numerous modifications and variations are possible in light of the above teachings and, therefore, are within the scope of the appended claims.

[0498] These and other changes may be made in light of the above detailed description. In general, in the following claims, the terms used should not be construed to limit the scope to the specific embodiments disclosed in the specification and the claims.

[0499] The entire disclosure of each document cited (including patents, patent applications, journal articles, abstracts, manuals, books or other disclosures) in the Background, Detailed Description, and Examples is herein incorporated by reference in their entireties.

[0500] Efforts have been made to ensure accuracy with respect to the numbers used (e.g. amounts, temperature, concentrations, etc.) but some experimental errors and deviations should be allowed for. Unless otherwise indicated, parts are parts by weight, molecular weight is average molecular weight; temperature is in degrees centigrade; and pressure is at or near atmospheric.

The application's sequence listing, which the Patent Office published only in electronic form, follows.

SEQUENCE LISTING (1026 sequences)

SEQ ID NO: 1 - protein, 867 aa, Adiantum pedatum
MALVDYGKLFEDLNQISMGVLDRVEFSEVMVIHRMYVRLADLNVGQLEGAEKVKRLYVFADVVELPVVEWRWPPQIPGSVTVIILCRLLQWPTDGRQSDTELHLTFMKLHAIQREENRWEITAADGMNWGVYIHAEEVQVGVLTMSWSSVLRVSALRSVITSGFRAVSVFEVPGSVRSTLGATLRPDHALYSTTMQATPNASHISAFNLRIVSPSAYRVCPLQNDTDTYLGIPADVAAVLPVDVVTDPNILLGMQTTVHIAELVKACHPSPDVVSAVGEHLNWLNKLLLPLKESTQLQGSESYKECLALLGRVHAAMKMVRIGLVVPQLQYRMYGSLINQMAQVAQNYDREFKQFKLFIIQNQILGSYLLQQNRAFAERELQMESFHAAVISQRREELDNTFAKMDRLSGQMEAESSAMEQAKKEMDEGLRQFQNRQVANALFAVLSAVAQIGLAFLTAGATAPGAVASAGQAVSIAGQAAQGLRRVVEILEQLEAVMEVVAAVKDLVDSLEQVGQIVDAPVMPELPSEADWSIFVNEVEAVAEGMPTEVSEVPVWRAKCKNVAALGREMSITAVQMSELQYDIWVQGMMRDMARSQADRLAAIQPADLTNYLEMATQMDMRTTRMLLGLLNILRIQNAALRYEYLLMPTELTTWPLGMDTVGDLLIAQENAALIGLMQLGPSSDFTSRHVVKDIPVNLLLDGEDWEFEIPVQAGMSSFPSSWSRVRIRHLEMHFVKEASGIGGEIIHQPTTQTGTVYILLQGSTIFHDRRRDQVLPFQAAAPLNYHYAYRLDTGDSTLTNEPSEQFANKFMQMTPFTRWRLRLSASAKENAGLAFPTATALDSTTQIVITFHVTAIRQIDWRHDEE

SEQ ID NO: 2 - DNA, 2601 bp, Adiantum pedatum
  source 1..2601: mol_type = other DNA
atggctctcgtggattacggcaagcttttcgaggatctgaaccagataagcatgggtgtactggatcgggtagagttttcagaggtgatggtgatccacaggatgtatgtgaggctagctgatctgaatgtggggcagctcgagggagccgagaaagtgaagcggttgtatgtgtttgcggacgtggtggagctaccagtcgtggaatggcggtggccgccgcaaataccaggatcggtgacggtgatcatattgtgtcgtcttcttcaatggccaactgatgggaggcagtcggacaccgagctccacctgacattcatgaagttgcatgccatacaacgagaggaaaatcggtgggagataaccgcagcagatggcatgaactggggagtttacatacacgcagaggaagtacaggttggcgtgctgacaatgtcatggtcttcggtacttagagtttcggcacttcgctctgttataacctccggctttcgcgccgttagtgtgtttgaggtaccgggaagtgtaaggtccacccttggagctactttaaggcccgatcacgccttatatagtacaactatgcaagccacacccaacgcatcgcatattagtgcttttaaccttcgcatagtttccccgtcggcatatcgtgtttgtcctctccaaaatgacacagatacctacttaggtattccagcagacgtggcggcagttcttccagtagacgtggtgactgatcctaacatcttgctgggcatgcagacaacggtacacattgcggagctagtcaaggcatgtcatccgtcacccgatgttgtgagcgctgtaggggagcacctgaactggctcaacaaactcttactcccacttaaggaatcgactcagttgcaaggaagcgagtcgtacaaggagtgccttgcactcttgggtcgtgttcacgctgcgatgaagatggtgagaattggcttagtagtgccccagctgcaatacagaatgtacggtagcctcatcaaccaaatggcccaagtagcacaaaactacgaccgagaattcaagcaattcaaattattcatcatccaaaatcaaatccttggcagctatttgctgcagcagaacagggcatttgctgagagggagctgcagatggagagctttcatgctgctgtcatttctcaaagaagggaggagttggacaatacattcgcaaagatggaccgattgagcgggcaaatggaggcagagagtagtgcaatggagcaagccaaaaaggaaatggacgaaggattgaggcagttccagaataggcaagttgcgaacgccctctttgccgttcttagcgctgtagctcagattgggcttgcattccttacggctggtgcaacggctcctggagctgtggcgtcggcggggcaagctgtgagcatagcaggtcaggcggcgcaaggtctgcgaagggtggtggaaattctagagcagctggaggctgtgatggaggttgtggctgctgtgaaggacctcgtggattcattggaacaggtaggtcagattgtggacgcaccggtgatgccggaattgccctcagaggcggactggtccatttttgtgaacgaggtggaggccgtggcagagggcatgccaacggaagtctcggaggttccggtgtggagggccaagtgcaagaatgtggctgcactgggtcgggagatgagcatcacggcagtacagatgtcggagctgcagtatgacatctgggtgcaaggcatgatgcgggatatggctcgaagccaggcagacaggctggccgcaattcaacccgcggaccttaccaactatttggagatggctacccagatggatatgcggactacgaggatgctgctggggctcctcaacatattgcgcatccagaatgcggcgctcaggtacgagtatcttctaatgcccacggagctcacaacatggccactgggtatggataccgtgggtgacttgctcatcgcgcaggagaatgctgcactgataggattaatgcagctagggccctcatctgatttcacgagcaggcatgtggtgaaagacatacctgtgaacttgctgctcgatggcgaggattgggagtttgagattcctgtgcaagctggcatgtccagcttcccttccagctggtctcgcgtccgtattcggcacctggagatgcactttgtgaaggaggccagcggtattggtggtgagattatccaccagcctaccacccagactgggaccgtttacatccttctgcagggttccactatcttccatgaccgcagaagagaccaggtgttgccttttcaggccgctgctccgctcaactaccattacgcgtaccgcctcgacaccggcgactccactctcacaaacgaaccctctgaacagtttgccaacaagttcatgcagatgacacccttcacccgttggaggcttcgtctgtctgcgtccgcaaaagagaatgcaggattagcctttcccacggctacagcacttgactccactacccagattgtcatcactttccatgttacggccatcagacaaattgactggcggcacgacgaagag

SEQ ID NO: 3 - protein, 886 aa, Microsorum musifolium
MEYSSLYGDVNQVSLRFQNMEFSEVMVVHRMHVRLEELDMTGVEGIEKVKRLYVLADVVELPSTATQVFQYLRLPASISAIILCRVLYIPEVDQRPHMAQCSLDFPFMRLHVVGSVHENVGGVMQAFSSDATPSNIGIYLHADRFIYRQATSPASNFVLPLDVRVSFGSSTYSGPTIRPDWQNLNVSNISYGPQHLSKGPPLTSSDSDLQRSDEIELLAQQDVWSPLLHVAFSPTALPGNIPGTQGLFRPSSACSFFHVPPPDVPANVLTDPSIILGMQMNMLIAELVLAAHNSPQVMNVITKHVLWLNKILLQVASPNDDILALLFRIQAFMKMAKQPRFVVPRLQYHMYGSLINRMVQVAQNYDQEFKQLKLFIAQNEILGSYLLQQNRAFAEREKEMSAFHSQVVSMRRSELQSAIQTMDNLSLQMESESEAMNEAQENMVEAIQEYERKLLARALFSVIGAIASVALAFATGGATAPGAVAAAGGAVAAAGRLAAGLQKVVDILQGLQAVMEVVVAIRDIVESLKNMGQLVEAPEMPEMPTDADWLIFVNEVEAVAEQVPTEVAEVPVWKAKCKNVAVLGQAMCTTAAYISELQYQITVEKMLQEIAQRQADRLVGISAADLSSYTEMASQIDMRTTRILLELIKMLYIQNAAIKYEYLYDANEKLNSWPVSMETVWTMLLQQENAALLGLLDLGPTNDFTVTYAVKDIPTKLLVDGFDWNFEIAVEDSAIFPSGWSRVRIRYVELKFDQQGADSSNIVIHQPSTNTGLVYMLLQGSRFLHDRKHEEVMDYEASLGPVYAYAYDLNTGATTLNNIPSQQYANTFMQMTPFNAWRLRLSASAVENQGLVFPTATSPDNTTQISITFYVTAIRRIDHRQEGDVE

SEQ ID NO: 4 - DNA, 2658 bp, Microsorum musifolium
  source 1..2658: mol_type = other DNA
atggaatatagcagcttgtacggtgatgtgaaccaagtgagcctgaggttccagaacatggagttctctgaggtcatggtggtgcatcggatgcatgtgcgcctcgaggagcttgacatgacgggggtggagggcatcgagaaggtgaaacgcctgtacgtgctggcggacgtggtggagctgccttccacagccacccaggtgtttcagtatctgcgccttcctgcctccatttcagcgattatcctctgccgtgttctctatatccctgaagttgatcagaggccccacatggctcaatgctcgctcgacttcccgttcatgcgcctccatgtcgtcggatctgtacacgagaatgttgggggtgttatgcaagccttttcctccgacgccacccccagcaatattggcatctacctccatgctgaccgcttcatctaccgccaggccacatctccggccagcaactttgtcttgcccctggatgtaagggtcagctttggcagctctacctactcgggcccaaccatccgtcccgactggcaaaaccttaatgtctccaacatcagctacgggccacagcatttgtccaagggcccacccctcacatcctcagactccgacttgcagagatctgacgagatcgagctcctggcgcagcaagatgtttggagccctcttttacatgtcgcgtttagcccgactgcactacctggcaacatcccgggtacacaaggactattccgaccctcctctgcatgcagcttcttccatgtgccgccaccggatgtccctgcgaacgtgctcactgatccttccatcatcttgggcatgcaaatgaacatgctcattgccgagcttgtcttggctgctcacaattcgccgcaggtcatgaacgtcatcactaagcatgtgctatggctcaacaagatcttgcttcaggttgcttcacccaatgatgatattttagcactcttgtttcgtatccaagcattcatgaagatggcaaagcaaccgcggtttgtggttccacggttgcagtaccacatgtacggtagccttatcaatcgaatggtgcaagtagcccagaattatgaccaggagttcaagcaactcaagcttttcatcgcacaaaatgagattttgggaagctatttgctacaacaaaatagggcttttgcagaaagggagaaggaaatgagtgcttttcactcgcaggtcgtgtcgatgaggagatctgagcttcagtctgccatacaaacaatggacaatttgagtttgcaaatggaatcagagagtgaggcgatgaacgaagcccaggagaacatggttgaagcaattcaagagtatgaaaggaaattacttgcaagagctctattttctgtgattggggcaatagcaagcgttgctcttgcatttgccactggtggtgcaactgcaccgggggcagtggcagcagccggaggggctgttgctgcagcagggaggttggcagcagggctccaaaaggttgtggacatcctacaaggcttgcaagcggtcatggaggttgtggtagccataagagacatcgtagaatcattgaaaaacatgggtcaactagtagaagctcccgagatgccagagatgccaacggatgcggactggttaatttttgtaaatgaggtggaggcagtggcagagcaagtgccaacagaagtggcagaggtcccagtgtggaaggctaagtgcaagaatgtggctgtgctagggcaagcaatgtgcaccacagcagcatatattagtgagctacagtatcagatcacggtggaaaagatgctacaagagattgcacagcgccaagcagacaggttggtggggatatcagcagcagatctatcgagctacacagagatggcatcacaaatagacatgcgtacaacccgaatcctccttgaactcatcaagatgttgtacattcaaaatgcagcaattaagtatgagtacttgtatgatgctaatgagaagcttaattcatggccagtgagcatggagactgtatggaccatgctcttgcaacaagagaatgcagctctcttgggcttgctagacttggggcccaccaatgatttcactgtaacctatgctgttaaagacatacctaccaagttgttagtagatgggtttgattggaattttgagatcgcggtggaggattctgcaatctttccatcaggatggtctcgtgttcgcatacgatatgttgagcttaaatttgaccaacaaggtgctgatagtagtaacattgtcatccaccagcctagcactaacactggcttagtctacatgctcttacaaggctcccggttcctccatgaccgcaaacatgaggaggtgatggactatgaggcaagcttgggacctgtatatgcatatgcttatgacctcaacactggtgcaaccactctcaacaacatcccctcacagcaatatgccaacacatttatgcaaatgacacccttcaacgcctggagacttcgcctctctgcctctgctgtggaaaatcagggattggtgtttcctacagcaacttctcctgacaatactacccaaatttccatcacattctatgtcactgctattcgacgcatagatcatcgacaagagggtgatgtggag

SEQ ID NO: 5 - protein, 853 aa, Adiantum trapeziforme
MDYSTLYRDLNQISIGVDRVEFSEVMVIHRMYVRLSDLNVGELPGAGRVKRVYVFADVVELAPRATLRDQMHMPGSVTVIVLCRLLQFPIDGSQATTLRLPFMQLHARVIEQNVKSEITATDGMNWGIYIYGEKVERSPLLPSNAILAVWADRCTITSARHNHVNAPGRIISTFTLGSGVTGITSMHGEPSLDPWNGVSLDSASPTAFSALPRQSRNISFTSIPVEVVTDPSILLGMQTTVLIAELVKVCRPPSPDMMSAVAEHALWLNDVLLQVVQNESQLQGTAPYNECLALLGRIECVMKIGRFVSVVPQLQYRMYGNLIKQMAQVAQNYDQEFKQFKLFIVQNQILGSYLLQKNKALADRELQMESFHSAVISQRRQELNTAIAKMERMSLQMEEENRAMEQAQKEMEEGLREFQNRQVARAVFAVLKAVAMIALVFVTAGATAPGAAASAGQAVSIAGQAAQALRRVVEILEGLEAVMEVVAAVKDLVDSLEQVGQIVGAPEMPDMPSEADWSIFVNEIEAVAEGMPTEVSEVPAWKAKCKNMAALGREMSITAVQISELQYEIWVQGLMRDIARSHADRLAAIQPVDLTNHLEMATHMDMRTTSMLIGLLNMLRIQNAALMYEYLLTPTELTVWPLGMDTVANLLIAQENAALVGLIQLGQSSNFTSRHVVKGIPVSLLLDGEDWEFEIPVQAGMSSFPFNWTRVRIRHLEMQFAQEASGGGGGEIIHQPSTRSGIVYILLQGSTIFHDRRRDEVMTFQAADPLNFQYAYRLDTGEATLTNEPSEDFANTFMQMTPFTRWRLRLSASASENAELAFPTATAPDSTTEVVITFHVTAIRQVDWRQEEE

SEQ ID NO: 6 - DNA, 2559 bp, Adiantum trapeziforme
  source 1..2559: mol_type = other DNA
atggattacagcacgctttacagggacctgaaccagataagcatcggtgtggaccgggtagagttctcagaggtgatggtgatccacaggatgtatgtaaggttgtctgatctgaatgtgggggagctccccggagccgggagagtgaagcgggtgtacgtgtttgcggatgtggtggagcttgcaccgcgtgcgacgctgcgggatcagatgcatatgccaggatcggtgacagtgatcgtattgtgtcgtcttcttcaatttccaatcgatgggtcgcaagctacaactctccggctgcctttcatgcagttgcatgccagagtcatagagcaaaatgtaaagtcggagataacagcaacagatggcatgaattggggaatctacatatacggggagaaagtagagaggagcccgctccttcctagcaatgcaatccttgcagtttgggcagatcgctgtactataacctcagcccgtcacaatcatgttaacgcacctgggagaataatatcgactttcacacttgggtcgggagtaacgggtataacctctatgcacggggaacccagtttggacccttggaatggtgtttctctcgactcagcttcccctacggcatttagtgctttacctcgccaaagtaggaatatatccttcacaagtattccagtagaggtggtgactgatcctagcatcttgctgggcatgcagaccaccgtgctcattgcggagctagtcaaggtatgtcgcccaccatcacccgacatgatgagtgctgtagcggagcacgcgctttggctcaatgatgtcttactccaagttgtccagaacgaatctcagttgcaagggactgcgccctacaacgagtgccttgcacttttgggtcgcattgaatgtgtgatgaaaatcgggagatttgtctcagtagtgcctcagctgcaatacagaatgtatggtaacctcatcaaacaaatggcccaagtagcacaaaactacgaccaagaattcaagcaattcaagttattcatcgtccaaaaccaaatccttggcagctatttgcttcagaagaacaaggcattagctgacagggagctgcagatggagagctttcattcagcggtcatttctcaaagaaggcaggagttgaatactgccatcgcaaagatggagcgaatgagcttgcaaatggaggaagagaatagagcaatggagcaagctcaaaaggaaatggaagaaggattgagggagttccagaataggcaagttgcaagggccgtatttgccgttcttaaagccgtagctatgattgcgcttgtattcgtcacggctggtgcgacggctcctggagctgcggcgtccgcggggcaagctgtgagcatagcaggtcaggccgcacaagctctgcgaagggtggtggaaattctagaggggctggaggctgtgatggaggttgtggctgctgtgaaggaccttgtggattcattggaacaggtaggtcagattgtgggggcaccggagatgccggacatgccctcggaggcggactggtccatttttgtgaatgagattgaggccgtggcagaggggatgccgacggaagtctcggaggttccggcatggaaggccaagtgcaagaatatggctgcactgggtagggagatgagcatcacggcagtacagatttctgagctccagtatgagatctgggtgcaaggcttgatgcgggatatagctcgaagccatgcagacaggttggctgcgattcaacctgtggaccttaccaaccatttggagatggccacacacatggatatgcggactacaagtatgctgatagggctcctcaacatgctgcgcatccagaatgcggcactcatgtacgagtaccttctaacacccacggagctcacagtatggccactgggtatggataccgtggccaacttgctcattgcgcaggagaatgctgcactggtgggattaattcagctagggcaatcgtcgaattttacgagcagacatgtggtgaaaggcatacctgtgagcttactgctcgatggtgaggattgggaattcgagatccctgtgcaagctggcatgtccagcttccctttcaactggactcgggtcaggattcggcacctggagatgcaatttgcgcaggaggcgagtggtggtggtggtggcgagattatccaccagccttccacccggtcggggattgtttacatcctcctgcagggctccactatcttccatgaccgcagaagagatgaggtgatgacctttcaggcagcggacccgctcaacttccaatatgcgtaccgcctcgacactggcgaagccactctaacgaatgagccctcggaagactttgcgaacacgttcatgcagatgacacccttcactcgctggaggcttcgtctctctgcgtccgcctcagagaatgcagaattagcgtttccaacagctacagctcccgactccactaccgaggttgtcatcacgttccatgttacggcaattagacaagttgactggcggcaagaggaggag

SEQ ID NO: 7 - protein, 852 aa, Adiantum trapeziforme
MDYSTLYRDLNQISMPLDRVEFSEVMVIHRMYLRLSDLNVGELPGAERVKRLYVLADVVELATFAHPQLLNTRMPGSVTVIILCRLLQFPTDGSFAAWLELPFMELHTLIEQYRSEIKAADDAKWGTYVHAEEVQLSPLFNGWPYLVVEAQRCIITAAMHNTFNRPGWVRSITQFTTDQSGRVDTTLLARTEFGHIDLPLETDSPTAFSVSHRQSTNLPVEYTGIPVEVVTDPNILMGMQTSVHIAELVKACYPSPELVSAVGVHVNWLNEVLLRVVQKESQLQGTEAYNECLALLGRIQCVMKMGPFVSVVPQLQYRMYGSLIRQMAQVAQNYDQDFRQLKLFIAQNQILGSYLLQQNKAFADREVQMESFHSAVISQRRQELDDAIAKMDRLSLQMEEEDRAMEQARKEMEEGLKQFQNEQVARAVFAVLKSVAMIALAFVTAGATAPGAAASAAQAVNIAGQAAQALRRVVEILEGLEAVMEVVAAIKHLVDALDQVSQIVDAPPMPDMPSEADWSIFVNEIEAVAEGMPTEVSEVPAWKAKCKNVAALGREMCITAEQISQLQYDIWVQGLLRDIAQSHADRLAAIQPANLTNYLEMAIQMDMRTTRILIGLLNIMRIQNAALMYEYLLTPTQLTAWPLRMDTVANLLITHESAALSGLAQLGPPSDFTSRHVVKGIPVSLLLDGGDWEFEIPVQGGMSSFPSSWTRVRIRHLEMHFVQEASGGGEIIHQPATQTGTIYILLQGSTVFHDRRREEVMTFQAAVPLNYHYAYRLDTGEATLTNEPSEQFANTFMQMTPFTHWRLRLSASAAENKGLAFPTATAPDSTTEIAITFHVTAIRQIDWRQEEE

SEQ ID NO: 8 - DNA, 2556 bp, Adiantum trapeziforme
  source 1..2556: mol_type = other DNA
atggattacagcacgctttacagggatctgaaccagataagcatgcccctggatcgggtagagttctcagaggtgatggtaatccacaggatgtacttgaggttatctgatctgaatgtgggggagctccccggagccgagagggtgaagcggttgtatgtgttggcagacgtggtggagctcgcaacatttgcgcatccacagttgcttaatacgcggatgccaggatcggtgacggtgatcattctgtgtcgtcttcttcagtttccaactgatgggtcgttcgctgcttggctcgagctgccgttcatggagttgcacacactcatagaacaatacaggtcagagataaaagcagcagatgacgcgaaatggggaacgtatgtacacgcggaggaagtacagctcagcccgctgtttaatgggtggccttatctggttgttgaggcacagcgctgtattataaccgcggccatgcacaatacatttaaccgccctgggtgggttcgctccattactcaatttacaactgatcagtccggtcgggtagataccacactgctcgcacgaacagaattcggccatattgatctaccactcgaaacagattccccaacggcattcagtgtttcacaccgccaaagtacgaatttgcccgtagagtacaccggtattccagtggaggtggtgaccgatcctaacatcttgatgggcatgcaaaccagcgtgcacattgcggagctagtgaaggcatgttacccgtcaccagaattagtgagcgctgtaggggtgcacgtgaattggctcaacgaagtcttgctccgagttgtccagaaggaatctcagttgcaagggaccgaggcctacaacgagtgccttgcgcttttaggtcgcattcaatgtgtcatgaagatggggccgtttgtctcggtagtgccgcagctgcaatacagaatgtatggtagcctcatcagacaaatggcccaggtagcacagaactacgaccaagatttcaggcagctcaagttattcattgcccaaaaccaaatccttggcagctatttgctgcagcagaacaaggcctttgctgacagagaggtgcagatggagagctttcattcagcggtcatttctcaaagaaggcaggagttggacgacgccatcgctaagatggaccgactgagcttgcagatggaggaagaggacagagcaatggagcaagcccgaaaagaaatggaagaaggattgaagcagttccagaatgagcaagttgcaagggctgtgttcgctgttcttaaatctgtagctatgattgcgctcgcattcgtcacggctggtgcaacggctcctggggctgcagcatctgcagcgcaagctgtgaacatagccggtcaagcggcacaagctctgcgaagggtggtggaaattctagaggggctcgaggctgtgatggaggttgtggctgctataaagcaccttgtggatgctctggaccaggtaagtcagattgtggatgcaccacctatgccagacatgccctcggaggcggactggagtatttttgtgaatgagattgaagccgtggcagaggggatgccgacggaagtctcggaggttccggcgtggaaggccaagtgcaagaatgtggctgcactgggtagggagatgtgcatcacggcagaacagatttcccagctccagtatgacatctgggtgcaaggcttgttgcgggatatagctcaaagccacgcagaccggctggcagcgattcaacctgctaatcttaccaactatttggagatggcaatacagatggatatgcggactacgaggatactgatagggctcctcaacataatgcgcatccagaatgcggcacttatgtatgagtaccttctaacgcccacgcagctcactgcatggccgctgagaatggatactgtggccaacttgctcatcacgcacgagagtgctgcactgtcaggattagctcagttagggcccccatcggacttcacgagcaggcatgtagtgaaaggcatacctgtgagcttgcttctagacggtggggattgggaatttgagattcctgtgcaaggtggcatgtccagtttcccttccagctggactcgagtgcggattcggcacctggagatgcactttgtgcaggaggcgagcggtggcggcgagattatccaccagcctgccacccagacggggaccatttacatcctcctgcagggctccactgtcttccatgatcgcagaagggaggaggtgatgacctttcaggcagcggttccgctcaactaccattacgcgtaccgcctcgacactggagaagccactcttacgaacgagccctcggaacagtttgccaacacattcatgcagatgacaccgttcactcactggaggctacgtctgtctgcgtccgcagcggagaataaaggattagcctttcccacagctacagctcccgactccaccactgagattgccatcactttccatgttacggccattagacaaattgactggcggcaagaggaggag

SEQ ID NO: 9 - protein, 851 aa, Adiantum trapeziforme
MDYSTLYRDLNQISIGVDRVEFSEVMVIHRMYVRLSDLNVGELPGAGRVKRVYVFADVVELAPRATLRDQMHMPGSVTVIVLCRLLQFPIDGSQATTLRLPFMQLHARVIEQNVKSEITATDGMNWGIYIYGEKVERSPLLPSNAILAVWADRCTITSARHNHVNAPGRIISTFTLGSGVTGITSMHGEPSLDPWNGVSLDSASPTAFSALPRQSRNISFTSIPVEVVTDPSILLGMQTTVLIAELVKVCRPPSPDMMSAVAEHALWLNDVLLQVVQKESQMQGTAPYNECLALLGRIECVMKIGRFVSVVPQLQYRMYGNLIKQMAQVAQNYDQEFKQFKLFIIQNQIFGSYLLQQNKAFADRELQMESFHSAVISQRRQELNTAIAKMERMSLQMEEENRAMEQAQKEMEEGLREFQNRQVARAVFAVLKAVAMIALAFVTAGATAPGAAASAGQAVSIAGQAAQALRRVVEILEGLEAVMEVVAAVKDLVDSLEQVGHIVGAPEMPDMPSEADWSIFVNEIEAVAEGMPTEVSEVPAWKAKCKNMAALGREMSITAVQISELQYEIWVQGLMRDIARSHADRLAAIQPVDLTNHLEMATHMDMRTTSMLIGLLNMLRIQNAALMYEYLLTPTELTVWPLGMDTVANLLIAQENAALVGLIQLGPSSNFTSRHVVKGIPVSLLLDGEDWEFEIPVQAGMSSFPFNWTRVRIRHLEMQFAQEASGGDEIIHQPSTRSGIVYILLQGSTIFHDRRRDEVMTFQAADPLNFQYAYRLDTGEATLTNEPSEEFANTFMQMTPFTRWRLRLSASASENAELAFPTATAPDSTTEVVITFHVTAIRQVDWRQEEE

SEQ ID NO: 10 - DNA, 2553 bp, Adiantum trapeziforme
  source 1..2553: mol_type = other DNA
atggattacagcacgctttacagggacctgaaccagataagcatcggtgtggaccgggtagagttctcagaggtgatggtgatccacaggatgtatgtaaggttgtctgatctgaatgtgggggagctccccggagccgggagagtgaagcgggtgtacgtgtttgcggatgtggtggagcttgcaccgcgtgcgacgctgcgggatcagatgcatatgccaggatcggtgacagtgatcgtattgtgtcgtcttcttcaatttccaatcgatgggtcgcaagctacaactctccggctgcctttcatgcagttgcatgccagagtcatagagcaaaatgtaaagtcggagataacagcaacagatggcatgaattggggaatctacatatacggggagaaagtagagaggagcccgctccttcctagcaatgcaatccttgcagtttgggcagatcgctgtactataacctcagcccgtcacaatcatgttaacgcacctgggagaataatatcgactttcacacttgggtcgggagtaacgggtataacctctatgcacggggaacccagtttggacccttggaatggtgtttctctcgactcagcttcccctacggcatttagtgctttacctcgccaaagtaggaatatatccttcacaagtattccagtagaggtggtgactgatcctagcatcttgctgggcatgcagaccaccgtgctaattgcggagctagtcaaggtatgtcgcccaccatcacccgacatgatgagtgctgtagcggagcacgcgctttggctcaatgatgtcttacttcaagttgtccagaaagaatcgcagatgcaagggactgcgccctacaacgagtgccttgcacttttgggtcgcattgaatgtgtgatgaaaatcgggagatttgtctcagtagtgcctcagctgcaatacagaatgtatggtaacctcatcaaacaaatggcccaagtagcacaaaactacgaccaagaattcaagcaattcaagttattcatcatccaaaaccaaatctttggcagctatttgcttcagcagaacaaggcatttgctgacagggagctgcagatggagagctttcattcagcggtcatttctcaaagaaggcaggagttgaatactgccatcgcaaagatggagcgaatgagcttgcaaatggaggaagagaatagagcaatggagcaagctcaaaaggaaatggaagaaggattgagggagttccagaataggcaagttgcaagggccgtatttgccgttcttaaagccgtagctatgattgcgcttgcattcgtcacggctggtgcgacggctcctggagctgcggcgtccgcggggcaagctgtgagcatagcaggtcaggccgcacaagctctgcgaagggtggtggaaattctagaggggctggaggctgtgatggaggttgtggctgctgtgaaggaccttgtggattcattggaacaggtaggtcacattgtgggggcaccggagatgccggacatgccctcggaggcggactggtccatttttgtgaatgagattgaggccgtggcagaggggatgccaacggaagtctcggaggttccggcatggaaggccaagtgcaagaatatggctgcactgggtagggagatgagcatcacggcagtacagatttctgagctccagtatgagatctgggtgcaaggcttgatgcgggatatagctcgaagccatgcagacaggttggctgcgattcaacctgtggaccttaccaaccatttggagatggccacacacatggatatgcggactacaagtatgctgatagggctcctcaatatgctgcgcatccagaatgcggcactcatgtacgagtaccttctaacacccacggagctcacagtatggccactgggtatggataccgtggccaacttgctcattgcgcaggagaatgctgcactggtgggattaattcagctagggccctcgtcgaattttacgagcagacatgtggtgaaaggcatacctgtgagcttgctgctcgatggtgaggattgggagttcgagatccctgtgcaagctggcatgtccagcttccctttcaactggactcgggtcaggattcggcacctggagatgcaatttgcgcaggaggcgagtggtggtgacgagattatccaccagccttccacccggtcggggattgtttacatcctcctgcagggctccactatcttccatgaccgcagaagagatgaggtgatgacctttcaggcagcggacccgctcaacttccaatatgcgtaccgcctcgacactggcgaagccactctaacgaatgagccctcggaagagtttgcgaacacgttcatgcagatgacacccttcactcgctggaggcttcgtctctctgcgtccgcctcagagaatgcagaattagcgtttccaacagctacagctcccgactccactaccgaggttgtcatcacgttccatgttacggcaatcagacaagttgactggcggcaagaggaggag

SEQ ID NO: 11 - protein, 851 aa, Adiantum trapeziforme
MDYSTLYRDLNQISIGVDRVEFSEVMVIHRMYVRLSDLNVGELPGAGRVKRVYVFADVVELAPRETLRDQMHMPGSVTVIILCRLLQFPIDGSQATTLRLPFMQLHARVIEQNVKSEITATDGMNWGIYIYGEKVERSPLLPSNAILAVWADRCTITSARHNHVNAPGRIISTFTLGSGVTGITSMHGEPSLDPWNGVSLDSASPTAFSALPRQSRNISFTSIPVEVVTDPSILLGMQTTVLIAELVKVCRPPSPDMMSAVAEHALWLNDVLLQVVQKESQMQGTAPYNECLALLGRIECVMKIGRFVSVVPQLQYRMYGNLIKQMAQVAQNYDQEFKQFKLFIIQNQIFGSYLLQQNKAFADRELQMESFHSAVISQRRQELNTAIAKMERMSLQMEEENRAMEQAQKEMEEGLREFQNRQVARAVFAVLKAVAMIALAFVTAGATAPGAAASAGQAVSIAGQAAQALRRVVEILEGLEAVMEVVAAVKDLVDSLEQVGHIVGAPEMPDMPSEADWSIFVNEIEAVAEGMPTEVSEVPAWKAKCKNMAALGREMSITAVQISELQYEIWVQGLMRDIARSHADRLAAIQPVDLTNHLEMATHMDMRTTSMLIGLLNMLRIQNAALMYEYLLTPTELTVWPLGMDTVANLLIAQENAALVGLIQLGPSSNFTSRHVVKGIPVSLLLDGEDWEFEIPVQAGMSSFPFNWTRVRIRHLEMQFAQEASGGDEIIHQPSTRSGIVYILLQGSTIFHDRRRDEVMTFQAADPLNFQYAYRLDTGEATLTNEPSEEFANTFMQMTPFTRWRLRLSASASENAELAFPTATAPDSTTEVVITFHVTAIRQVDWRQEEE

SEQ ID NO: 12 - DNA, 2553 bp, Adiantum trapeziforme
  source 1..2553: mol_type = other DNA
atggattacagcacgctttacagggacctgaaccagataagcatcggtgtggaccgggtagagttctcagaggtgatggtgatccacaggatgtatgtaaggttgtctgatctgaatgtgggggagctccccggagccgggagagtgaagcgggtgtacgtgtttgcggatgtggtggagcttgcaccgcgcgagacgctgcgggaccagatgcatatgccaggatcggtgacagtgatcatattgtgtcggcttcttcaatttccaatcgatgggtcgcaagctacaactctccggctgcctttcatgcagttgcatgccagagtcatagagcaaaatgtaaagtcggagataacagcaacagatggcatgaattggggaatctacatatacggggagaaagtagagaggagcccgctccttcctagcaatgcaatccttgcagtttgggcagatcgctgtactataacctcagcccgtcacaatcatgttaacgcacctgggagaataatatcgactttcacacttgggtcgggagtaacgggtataacctctatgcacggggaacccagtttggacccttggaatggtgtttctctcgactcagcttcccctacggcatttagtgctttacctcgccaaagtaggaatatatccttcacaagtattccagtagaggtggtgactgatcctagcatcttgctgggcatgcagaccaccgtgctaattgcggagctagtcaaggtatgtcgcccaccatcacccgacatgatgagtgctgtagcggagcacgcgctttggctcaatgatgtcttacttcaagttgtccagaaagaatcgcagatgcaagggactgcgccctacaacgagtgccttgcacttttgggtcgcattgaatgtgtgatgaaaatcgggagatttgtctcagtagtgcctcagctgcaatacagaatgtatggtaacctcatcaaacaaatggcccaagtagcacaaaactacgaccaagaattcaagcaattcaagttattcatcatccaaaaccaaatctttggcagctatttgcttcagcagaacaaggcatttgctgacagggagctgcagatggagagctttcattcagcggtcatttctcaaagaaggcaggagttgaatactgccatcgcaaagatggagcgaatgagcttgcaaatggaggaagagaatagagcaatggagcaagctcaaaaggaaatggaagaaggattgagggagttccagaataggcaagttgcaagggccgtatttgccgttcttaaagccgtagctatgattgcgcttgcattcgtcacggctggtgcgacggctcctggagctgcggcgtccgcggggcaagctgtgagcatagcaggtcaggccgcacaagctctgcgaagggtggtggaaattctagaggggctggaggctgtgatggaggttgtggctgctgtgaaggaccttgtggattcattggaacaggtaggtcacattgtgggggcaccggagatgccggacatgccctcggaggcggactggtccatttttgtgaatgagattgaggccgtggcagaggggatgccaacggaagtctcggaggttccggcatggaaggccaagtgcaagaatatggctgcactgggtagggagatgagcatcacggcagtacagatttctgagctccagtatgagatctgggtgcaaggcttgatgcgggatatagctcgaagccatgcagacaggttggctgcgattcaacctgtggaccttaccaaccatttggagatggccacacacatggatatgcggactacaagtatgctgatagggctcctcaatatgctgcgcatccagaatgcggcactcatgtacgagtaccttctaacacccacggagctcacagtatggccactgggtatggataccgtggccaacttgctcattgcgcaggagaatgctgcactggtgggattaattcagctagggccctcgtcgaattttacgagcagacatgtggtgaaaggcatacctgtgagcttgctgctcgatggtgaggattgggagttcgagatccctgtgcaagctggcatgtccagcttccctttcaactggactcgggtcaggattcggcacctggagatgcaatttgcgcaggaggcgagtggtggtgacgagattatccaccagccttccacccggtcggggattgtttacatcctcctgcagggctccactatcttccatgaccgcagaagagatgaggtgatgacctttcaggcagcggacccgctcaacttccaatatgcgtaccgcctcgacactggcgaagccactctaacgaatgagccctcggaagagtttgcgaacacgttcatgcagatgacacccttcactcgctggaggcttcgtctctctgcgtccgcctcagagaatgcagaattagcgtttccaacagctacagctcccgactccactaccgaggttgtcatcacgttccatgttacggcaatcagacaagttgactggcggcaagaggaggag

SEQ ID NO: 13 - protein, 854 aa, Adiantum peruvianum
MDYSTLYRDLNQISIGVDRVEFSEVMVIHRMYVRLSDLNVGELPGAGRVKRVYVFADVVELAPRATLRDQMHMPGSVTVIVLCRLLQFPIDGSQATTLRLPFMQLHARVIEQNVKSEITATDGMNWGIYIYGEKVERSPLLPSNAILAVWADRCTITSARHNHVNAPGRIISTFTLGSGVTGITSMHGEPSLDPWNGVSLDSASPTAFSALPRQSRNISFTSIPVEVVTDPSILLGMQTTVLIAELVKVCRPPSPDMMSAVAEHALWLNDVLLQVVQKESQMQGTAPYNECLALLGRIECVMKIGRFVSVVPQLQYRMYGNLIKQMAQVAQNYDQEFKQFKLFIIQNQIFGSYLLQQNKAFADRELQMESFHSAVISQRRQELNTAIAKMERMSLQMEEENRAMEQAQKEMEEGLREFQNRQVARAVFAVLKAVAMIALAFVTAGATAPGAAASAGQAVSIAGQAAQALRRVVEILEGLEAVMEVVAAVKDLVDSLEQVGHIVGAPEMPDMPSEADWSIFVNEIEAVAEGMPTEVSEVPAWKAKCKNMAALGREMSITAVQISELQYEIWVQGLMRDIARSHADRLAAIQPVDLTNHLEMATHMDMRTTSMLIGLLNMLRIQNAALMYEYLLTPTELTVWPLGMDTVANLLIAQENAALVGLIQLGPSSNFTSRHVVKGIPVSLLLDGEDWEFEIPVQAGMSSFPFNWTRVRIRHLEMQFAQEASGGDEIIHQPSTRSGIVYILLQGSTIFHDRRRDEVMTFQAADPLNFQYAYRLDTGEATLTNEPSEEFANTFMQMTPFTRWRLRLSASASENAELAFPTATAPDSTTEVVITFHVTAIRQVDWRQEEKEEE

SEQ ID NO: 14 - DNA, 2562 bp, Adiantum peruvianum
  source 1..2562: mol_type = other DNA
atggattacagcacgctttacagggacctgaaccagataagcatcggtgtggaccgggtagagttctcagaggtgatggtgatccacaggatgtatgtaaggttgtctgatctgaatgtgggggagctccccggagccgggagagtgaagcgggtgtacgtgtttgcggatgtggtggagcttgcaccgcgtgcgacgctgcgggatcagatgcatatgccaggatcggtgacagtgatcgtattgtgtcgtcttcttcaatttccaatcgatgggtcgcaagctacaactctccggctgcctttcatgcagttgcatgccagagtcatagagcaaaatgtaaagtcggagataacagcaacagatggcatgaattggggaatctacatatacggggagaaagtagagaggagcccgctccttcctagcaatgcaatccttgcagtttgggcagatcgctgtactataacctcagcccgtcacaatcatgttaacgcacctgggagaataatatcgactttcacacttgggtcgggagtaacgggtataacctctatgcacggggaacccagtttggacccttggaatggtgtttctctcgactcagcttcccctacggcatttagtgctttacctcgccaaagtaggaatatatccttcacaagtattccagtagaggtggtgactgatcctagcatcttgctgggcatgcagaccaccgtgctaattgcggagctagtcaaggtatgtcgcccaccatcacccgacatgatgagtgctgtagcggagcacgcgctttggctcaatgatgtcttacttcaagttgtccagaaagaatcgcagatgcaagggactgcgccctacaacgagtgccttgcacttttgggtcgcattgaatgtgtgatgaaaatcgggagatttgtctcagtagtgcctcagctgcaatacagaatgtatggtaacctcatcaaacaaatggcccaagtagcacaaaactacgaccaagaattcaagcaattcaagttattcatcatccaaaaccaaatctttggcagctatttgcttcagcagaacaaggcatttgctgacagggagctgcagatggagagctttcattcagcggtcatttctcaaagaaggcaggagttgaatactgccatcgcaaagatggagcgaatgagcttgcaaatggaggaagagaatagagcaatggagcaagctcaaaaggaaatggaagaaggattgagggagttccagaataggcaagttgcaagggccgtatttgccgttcttaaagccgtagctatgattgcgcttgcattcgtcacggctggtgcgacggctcctggagctgcggcgtccgcggggcaagctgtgagcatagcaggtcaggccgcacaagctctgcgaagggtggtggaaattctagaggggctggaggctgtgatggaggttgtggctgctgtgaaggaccttgtggattcattggaacaggtaggtcacattgtgggggcaccggagatgccggacatgccctcggaggcggactggtccatttttgtgaatgagattgaggccgtggcagaggggatgccaacggaagtctcggaggttccggcatggaaggccaagtgcaagaatatggctgcactgggtagggagatgagcatcacggcagtacagatttctgagctccagtatgagatctgggtgcaaggcttgatgcgggatatagctcgaagccatgcagacaggttggctgcgattcaacctgtggaccttaccaaccatttggagatggccacacacatggatatgcggactacaagtatgctgatagggctcctcaatatgctgcgcatccagaatgcggcactcatgtacgagtaccttctaacacccacggagctcacagtatggccactgggtatggataccgtggccaacttgctcattgcgcaggagaatgctgcactggtgggattaattcagctagggccctcgtcgaattttacgagcagacatgtggtgaaaggcatacctgtgagcttgctgctcgatggtgaggattgggagttcgagatccctgtgcaagctggcatgtccagcttccctttcaactggactcgggtcaggattcggcacctggagatgcaatttgcgcaggaggcgagtggtggtgacgagattatccaccagccttccacccggtcggggattgtttacatcctcctgcagggctccactatcttccatgaccgcagaagagatgaggtgatgacctttcaggcagcggacccgctcaacttccaatatgcgtaccgcctcgacactggcgaagccactctaacgaatgagccctcggaagagtttgcgaacacgttcatgcagatgacacccttcactcgctggaggcttcgtctctctgcgtccgcctcagagaatgcagaattagcgtttccaacagctacagctcccgactccactaccgaggttgtcatcacgttccatgttacggcaatcagacaagttgactggcggcaggaggagaaagaggaggag

SEQ ID NO: 15 - protein, 852 aa, Lygodium flexuosum
MASVLDYSTLYRDLNQISMAVDQVEFSEVMVIHRMYVNLADLDVAELVGAETVKRVYVFADVVELAPGKRTQLPGSVTVIILCRLLQFPTGGSRAATLQLPFMKVHATLIERFRSEIAAADGMNWGTYIHGEEVQVSPLYPNNSILGVWADRSIITSAFHNVFDEPGRVISSTSITRAQSAPNNTTMSAEPGWLSGNRFLLYTVSRSAFSVLPSQSTNVSFTSIPVEVVTDPNILLGMQTTVHIAELVKAGHPSPDIVSAVAEHAIWLSKVLLQVVQNESHLQGTESYNECLALLGRVQSVIKMGRFGLVVPQLQYRMYGSLIKQMAQVAQNYDQDFKRFRLFILQNQILGSYLLEQNKAFADRELQMESFHSAVISQRKGELDTAFAKMDRLSLQMEEENGAMEQAQKEMDEGLRQFQNRQVARALFAVLRAVAQIGLAFVTAGATAPGAVASAGQAVSIAGQAAQGLRRVVEILEQLEAVMEVVAAVKDLVNSLEQVGQLVQAPVMPDMPSEADWSIFVNEVEAVAEGMPTEVSEVPAWKAKCKNVAALGREMSITAVQISELQYDIWVQGMMRDIAQSQADRLAAIQPADLTNFLEMATQMDMRTTRMLIGLLNMLRIQNAALMYEYLLTPTELTAWPLGMDTVGNLLIAQENAALLGLTQLGPSSDFTSRHVVKGIPVSLLLDGEDWEFEIPVQGGMSSFPSSWTRVRIRHLEMHFVQESMNGGGEIIHQPATQTGTVYILLQGSTIFHDRRRDEVMTFQAAAPLNYQYAYRLDTGETTLTNQPSEHFANTFMQMTPFTRWRLRLSASAPENAGLAFPTATALDSTTQIVITFHVTAIRQIDWRHEEE

SEQ ID NO: 16 - DNA, 2556 bp, Lygodium flexuosum
  source 1..2556: mol_type = other DNA
atggccagtgtactggattacagcacgctttacagggatctgaaccagataagcatggctgtggatcaggtagagttctcagaggtgatggtgatccacaggatgtatgtgaatttagctgacctggatgtggcggagctcgtgggagctgagacagtgaagcgggtgtatgtgtttgcggatgtggtggagcttgcaccggggaaacggacgcaattgccaggatcggtgacggtgatcatattgtgtcgtcttcttcaatttccaactggtgggtcgcgagcagcaactctccagctgcctttcatgaaggtccatgctacactcatagagcgatttaggtcagagatagcagcagcagatgggatgaactggggaacgtacatacacggggaggaagtacaggtcagcccgctgtatcctaacaattcaatacttggagtttgggcagatcgctctattataacctcagcctttcacaatgtgttcgacgaacctgggagagtaatttccagtactagtattacaagggcacagtcagcacccaacaacacgactatgtcagcagaacccggctggctctctggcaatcgttttctactttacacggtttcccggtcggcattcagtgttttacctagccaaagtacgaatgtatccttcacaagtattccggtagaggtggtgactgatccgaacatcttgctgggcatgcagacaacagtgcacattgcggagctagtcaaggcaggtcacccgtcacccgacattgtgagcgcggtagcggagcacgcgatttggctcagcaaagtcttgctccaagttgtgcagaacgaatctcacttgcaagggaccgagtcctacaacgagtgcctggcacttttgggccgtgttcaatctgtgatcaagatggggagatttggcttagtagtgccccagctgcaatacagaatgtacggtagcctcatcaaacaaatggcccaagtagcacagaactacgaccaagatttcaagcgattccggttattcattcttcaaaatcaaatccttggcagctatttgctggagcagaacaaggcatttgctgacagggagctgcagatggagagcttccattcagccgtgatttctcaaagaaaaggcgagctggacactgccttcgcaaagatggaccgactgagcttgcaaatggaggaagagaatggcgcaatggagcaagcccaaaaggaaatggacgaaggattaaggcagttccagaataggcaagttgcaagggccctctttgccgttcttagagctgtagctcagattgggcttgcattcgtcacggctggtgcaacggctcctggagctgtggcgtccgcggggcaagccgtgagcatagcaggtcaggccgcgcaaggtctgcgaagggtggtggaaatcctagagcagctggaagctgtgatggaggttgtggctgctgtgaaggaccttgtgaattcattggaacaggtaggtcagttggtgcaggcaccggtgatgccggacatgccctcggaagcggactggtccatttttgtgaatgaggtcgaggccgtggcagaggggatgccgacggaagtctcggaggttccagcgtggaaggccaagtgcaagaatgtggctgcactgggtcgggagatgagcatcaccgcagtacaaatttctgagctccagtatgacatctgggtgcaaggcatgatgcgggatattgctcaaagccaggcagacaggctggcggcgattcaacccgcggaccttaccaactttttggagatggcaacacagatggatatgcggactacaaggatgctgatagggctcctcaacatgctccgcatccagaatgcggcactcatgtacgagtaccttcttacgcccacggagctcacagcatggccgctgggtatggataccgtgggcaacttgctcattgcgcaggagaatgctgcactattaggattaactcagctaggaccctcatccgatttcacgagcaggcatgtggtgaaaggcatacctgtgagcttgctactcgatggtgaggattgggagttcgagatccctgtgcaaggtggcatgtccagcttcccttcaagctggactcgcgtccggattcggcacttggagatgcactttgtgcaagagtcgatgaacggtggcggcgagattattcaccagcctgccacccagactgggaccgtttacatcctcctgcagggctccactatcttccatgaccgcagaagagacgaggtgatgacctttcaggcagcggctccgctcaactaccagtacgcgtaccgcctcgacactggtgaaaccactcttacgaaccagccctcggaacactttgccaacacgttcatgcagatgacacccttcactcgctggaggcttcgtctctctgcgtccgccccagagaatgcaggattagcctttcccacagctacagctctcgactccactacccagattgtcatcactttccatgttacggccattagacaaattgactggcggcacgaggaggag

SEQ ID NO: 17 - protein, 852 aa, Adiantum peruvianum
MDYSTLYRDLNQISMPLDRVEFSEVMVIHRMYLRLSDLNVGELPGAERVKRLYVFADVVELATFAYPQLLHTRMPGSVTVIILCRLLQFPTDGSFAAWLELPFMELHTLIEQYRSEIKAADDAKWGTYVHAEEVQLSPLFNGWPYLVVEAQRCIITAAMHNTFNRPGWVRSVTQFTTDQSGRVDTTLLARTEFGHIYLPLETDSPTAFSVSHRQSTNLPVEYTGIPVEVVTDPNILMGMQTSVHIAELVKACYPSPELVSAVGVHVNWLNEVLLRVVQKESQLQGTEAYNECLALLGRIQCVMKMGPFVSVVPQLQYRMYGSLIRQMAQVAQNYDQDFRQLKLFIAQNQILGSYLLQQNKAFADREVQMESFHSAVISQRRQELDDALAKMDRLSLQMEEEDRAMEQARKEMEEGLKQFQNEQVARAVFAVLKSVAMIALAFVTAGATAPGAAASAAQAVNIAGQAAQALRRVVEILEGLEAVMEVVAAIKHLVDALDQVSQIVDAPPMPDMPSEADWSIFVNEIEAVAEGMPTEVSEVPAWKAKCKNVAALGREMCITAEQISQLQYDIWVQGLLRDIAQTHADRLAAIQPANLTNYLEMATQMDMRTTRILIGLLNIMRIQNAALMYEYLLTPTQLTAWPLRMDTVANLLITQESAALSGLAQLGPPSDFTSRHVVKGIPVSLLLDGGDWEFEIPVQGGMSSFPSSWTRVRIRHLEMHFVQEASGGGEIIHQPATQTGTVYILLQGSTVFHDRRREEVMTFQAAVPLNYHYAYRLDTGEATLTNEPSEQFANTFMQMTPFTHWRLRLSASAAENEGLAFPTATAPDSTTEIAITFHVMAIRQIDWRQEEE

SEQ ID NO: 18 - DNA, 2556 bp, Adiantum peruvianum
  source 1..2556: mol_type = other DNA
atggattacagcactctttacagggatctgaaccagataagcatgcccctggatcgggtagagttctcagaggtgatggtaatccacaggatgtacttgaggttatctgatctgaatgtgggggagctccccggagccgagagggtgaagcggttgtatgtgtttgcagacgtggtggagctcgcgacatttgcgtatccacagttgcttcatacgcggatgccaggatcggtgacggtgatcattctgtgtcgtcttcttcagtttccaactgatgggtcgttcgctgcttggctcgagctgccgttcatggagttgcacacactcatagaacaatacaggtcagagataaaagcagcagatgacgcgaaatggggaacgtatgtacacgcggaggaagtacagctcagcccgctgtttaatgggtggccttatctggttgttgaggcacagcgctgtattataaccgcggccatgcacaatacatttaaccgccctgggtgggttcgctccgttactcaatttacaactgatcagtccggtcgggtagataccacactgctcgcacgaacagaattcggccatatttatctaccactcgagacagattccccaacggcattcagtgtttcacaccgccaaagtacgaatttgcccgtagagtacaccggtattccagtagaggtggtgaccgatcctaacatcttgatgggcatgcaaaccagcgtgcacattgcggagctagtgaaggcatgttacccgtcaccagaattagtgagcgctgtaggggtgcacgtgaattggctcaacgaagtcttgctccgagttgtccagaaggaatctcagttgcaagggaccgaggcctacaacgagtgccttgcgcttttgggtcgcattcaatgtgtcatgaagatggggccgtttgtctcggtagtgccgcagctgcaatacagaatgtatggtagcctcatcagacaaatggcccaggtagcacagaactacgaccaagatttcaggcagctcaagttattcattgcccaaaaccaaatccttggcagctatttgctgcagcagaacaaggcatttgctgacagagaggtgcagatggagagctttcattcagcggtcatttctcaaagaaggcaggagttggacgacgccctcgctaagatggaccgactgagcttgcagatggaggaagaggacagagcaatggagcaagcccgaaaagaaatggaagaaggattgaagcagttccagaatgagcaagttgcaagggctgtgttcgctgttcttaaatctgtagctatgattgcgctcgcattcgtcacggctggtgcaacggctcctggggctgcagcatccgcagcgcaagctgtgaacatagccggtcaagcggcacaagctctgcgaagggtggtggaaattctagaggggctcgaggctgtgatggaggttgtggctgctataaagcaccttgtggatgctctggaccaggtaagtcagattgtggatgcaccacctatgccagacatgccctcggaggcagactggagtatttttgtgaatgagattgaagccgtggcagaggggatgccgacggaagtctcggaggttccggcgtggaaggccaagtgcaagaatgtggctgcactgggtagggagatgtgcatcacggcagaacagatttcccagctccagtatgacatctgggtgcaaggcttgttgcgggatatagctcaaacccacgcagaccggctggcagcgattcaacctgctaatcttaccaactatttggagatggcaacacagatggatatgcggactacgaggatattgatagggctcctcaacataatgcgcatccagaatgcggcacttatgtatgagtaccttctaacgcccacgcagctcactgcatggccgctgagaatggatactgtggccaacttgctcatcacgcaggagagtgctgcactgtcaggattagctcagttagggcccccatcggacttcacgagcaggcatgtggtgaaaggcatacctgtgagcttgcttctagacggtggggattgggaatttgagattcctgtgcaaggtggcatgtccagtttcccttccagctggactcgagtgcggattcggcacctggagatgcactttgtgcaggaggcgagcggtggcggcgagattatccaccagcctgccacccagacggggaccgtttacatcctcctgcagggctccactgtcttccatgatcgcagaagggaggaggtgatgacctttcaggcagcggttccgctcaactaccattacgcgtaccgcctcgacactggagaagccactcttacgaacgagccctcggaacagtttgccaacacattcatgcagatgacaccgttcactcactggaggctacgtctgtctgcgtccgcagcggagaatgaaggattagcctttcccacagctacagctcccgactccaccactgagattgccatcactttccatgttatggccattagacaaatcgactggcggcaagaggaggag

SEQ ID NO: 19 - protein, 782 aa, Adiantum peruvianum
MDYSTLYRDLNQISIGVDRVEFSEVMVIHRMYVRLSDLNVGELPGAGRVKRVYVFADVVELAPRATLRDQMHMPGSVTVIVLCRLLQFPIDGSQATTLRLPFMQLHARVIEQNVKSEITATDGMNWGIYIYGEKVERSPLLPSNAILAVWADRCTITSARHNHVNAPGRIISTFTLGSGVTGITSMHGEPSLDPWNGVSLDSASPTAFSALPRQSRNISFTSIPVEVVTDPSILLGMQTTVLIAELVKVCRPPSPDMMSAVAEHALWLNDVLLQVVQKESQMQGTAPYNECLALLGRIECVMKIGRFVSVVPQLQYRMYGNLIKQMAQVAQNYDQEFKQFKLFIIQNQIFGSYLLQQNKAFADRELQMESFHSAVISQRRQELNTAIAKMERMSLQMEEENRAMEQAQKEMEEGLREFQNRQVARAVFAVLKAVAMIALAFVTAGATAPGAAASAGQAVSIAGQAAQALRRVVEILEGLEAVMEVVAAVKDLVDSLEQVGHIVGAPEMPDMPSEADWSIFVNEIEAVAEGMPTEVSEVPAWKAKCKNMAALGREMSITAVQISELQYEIWVQGLMRDIARSHADRLAAIQPVDLTNHLEMATHMDMRTTSMLIGLLNMLRIQNAALMYEYLLTPTELTVWPLGMDTVANLLIAQENAALVGLIQLGPSSNFTSRHVVKGIPVSLLLDGEDWEFEIPVQAGMSSFPFNWTRVRIRHLEMQFAQEASGGDEIIHQPSTRSGIVYILLQGSTIFHDRRRDEVMTFQAADPLNFQMRTASTLAKPL

SEQ ID NO: 20 - DNA, 2346 bp, Adiantum peruvianum
  source 1..2346: mol_type = other DNA
atggattacagcacgctttacagggacctgaaccagataagcatcggtgtggaccgggtagagttctcagaggtgatggtgatccacaggatgtatgtaaggttgtctgatctgaatgtgggggagctccccggagccgggagagtgaagcgggtgtacgtgtttgcggatgtggtggagcttgcaccgcgtgcgacgctgcgggatcagatgcatatgccaggatcggtgacagtgatcgtattgtgtcgtcttcttcaatttccaatcgatgggtcgcaagctacaactctccggctgcctttcatgcagttgcatgccagagtcatagagcaaaatgtaaagtcggagataacagcaacagatggcatgaattggggaatctacatatacggggagaaagtagagaggagcccgctccttcctagcaatgcaatccttgcagtttgggcagatcgctgtactataacctcagcccgtcacaatcatgttaacgcacctgggagaataatatcgactttcacacttgggtcgggagtaacgggtataacctctatgcacggggaacccagtttggacccttggaatggtgtttctctcgactcagcttcccctacggcatttagtgctttacctcgccaaagtaggaatatatccttcacaagtattccagtagaggtggtgactgatcctagcatcttgctgggcatgcagaccaccgtgctaattgcggagctagtcaaggtatgtcgcccaccatcacccgacatgatgagtgctgtagcggagcacgcgctttggctcaatgatgtcttacttcaagttgtccagaaagaatcgcagatgcaagggactgcgccctacaacgagtgccttgcacttttgggtcgcattgaatgtgtgatgaaaatcgggagatttgtctcagtagtgcctcagctgcaatacagaatgtatggtaacctcatcaaacaaatggcccaagtagcacaaaactacgaccaagaattcaagcaattcaagttattcatcatccaaaaccaaatctttggcagctatttgcttcagcagaacaaggcatttgctgacagggagctgcagatggagagctttcattcagcggtcatttctcaaagaaggcaggagttgaatactgccatcgcaaagatggagcgaatgagcttgcaaatggaggaagagaatagagcaatggagcaagctcaaaaggaaatggaagaaggattgagggagttccagaataggcaagttgcaagggccgtatttgccgttcttaaagccgtagctatgattgcgcttgcattcgtcacggctggtgcgacggctcctggagctgcggcgtccgcggggcaagctgtgagcatagcaggtcaggccgcacaagctctgcgaagggtggtggaaattctagaggggctggaggctgtgatggaggttgtggctgctgtgaaggaccttgtggattcattggaacaggtaggtcacattgtgggggcaccggagatgccggacatgccctcggaggcggactggtccatttttgtgaatgagattgaggccgtggcagaggggatgccaacggaagtctcggaggttccggcatggaaggccaagtgcaagaatatggctgcactgggtagggagatgagcatcacggcagtacagatttctgagctccagtatgagatctgggtgcaaggcttgatgcgggatatagctcgaagccatgcagacaggttggctgcgattcaacctgtggaccttaccaaccatttggagatggccacacacatggatatgcggactacaagtatgctgatagggctcctcaatatgctgcgcatccagaatgcggcactcatgtacgagtaccttctaacacccacggagctcacagtatggccactgggtatggataccgtggccaacttgctcattgcgcaggagaatgctgcactggtgggattaattcagctagggccctcgtcgaattttacgagcagacatgtggtgaaaggcatacctgtgagcttgctgctcgatggtgaggattgggagttcgagatccctgtgcaagctggcatgtccagcttccctttcaactggactcgggtcaggattcggcacctggagatgcaatttgcgcaggaggcgagtggtggtgacgagattatccaccagccttccacccggtcggggattgtttacatcctcctgcagggctccactatcttccatgaccgcagaagagatgaggtgatgacctttcaggcagcggacccgctcaacttccaaatgcgtaccgcctcgacactggcgaagccactc

SEQ ID NO: 21 - protein, 623 aa, Adiantum trapeziforme
MDYSTLYRDLNQISIGVDRVEFSPDMMSAVAEHALWLNDVLLQVVQKESQMQGTAPYNECLALLGRIECVMKIGRFVSVVPQLQYRMYGNLIKQMAQVAQNYDQEFKQFKLFIIQNQIFGSYLLQQNKAFADRELQMESFHSAVISQRRQELNTAIAKMERMSLQMEEENRAMEQAQKEMEEGLREFQNRQVARAVFAVLKAVAMIALAFVTAGATAPGAAASAGQAVSIAGQAAQALRRVVEILEGLEAVMEVVAAVKDLVDSLEQVGHIVGAPEMPDMPSEADWSIFVNEIEAVAEGMPTEVSEVPAWKAKCKNMAALGREMSITAVQISELQYEIWVQGLMRDIARSHADRLAAIQPVDLTNHLEMATHMDMRTTSMLIGLLNMLRIQNAALMYEYLLTPTELTVWPLGMDTVANLLIAQENAALVGLIQLGPSSNFTSRHVVKGIPVSLLLDGEDWEFEIPVQAGMSSFPFNWTRVRIRHLEMQFAQEASGGDEIIHQPSTRSGIVYILLQGSTIFHDRRRDEVMTFQAADPLNFQYAYRLDTGEATLTNEPSEEFANTFMQMTPFTRWRLRLSASASENAELAFPTATAPDSTTEVVITFHVTAIRQVDWRQEEKEEE

SEQ ID NO: 22 - DNA, 1869 bp, Adiantum trapeziforme
  source 1..1869: mol_type = other DNA
atggattacagcacgctttacagggacctgaaccagataagcatcggtgtggaccgggtagagttctcacccgacatgatgagtgctgtagcggagcacgcgctttggctcaatgatgtcttacttcaagttgtccagaaagaatcgcagatgcaagggactgcgccctacaacgagtgccttgcacttttgggtcgcattgaatgtgtgatgaaaatcgggagatttgtctcagtagtgcctcagctgcaatacagaatgtatggtaacctcatcaaacaaatggcccaagtagcacaaaactacgaccaagaattcaagcaattcaagttattcatcatccaaaaccaaatctttggcagctatttgcttcagcagaacaaggcatttgctgacagggagctgcagatggagagctttcattcagcggtcatttctcaaagaaggcaggagttgaatactgccatcgcaaagatggagcgaatgagcttgcaaatggaggaagagaatagagcaatggagcaagctcaaaaggaaatggaagaaggattgagggagttccagaataggcaagttgcaagggccgtatttgccgttcttaaagccgtagctatgattgcgcttgcattcgtcacggctggtgcgacggctcctggagctgcggcgtccgcggggcaagctgtgagcatagcaggtcaggccgcacaagctctgcgaagggtggtggaaattctagaggggctggaggctgtgatggaggttgtggctgctgtgaaggaccttgtggattcattggaacaggtaggtcacattgtgggggcaccggagatgccggacatgccctcggaggcggactggtccatttttgtgaatgagattgaggccgtggcagaggggatgccaacggaagtctcggaggttccggcatggaaggccaagtgcaagaatatggctgcactgggtagagagatgagcatcacggcagtacagatttctgagctccagtatgagatctgggtgcaaggcttgatgcgggatatagctcgaagccatgcagacaggttggctgcgattcaacctgtggaccttaccaaccatttggagatggccacacacatggatatgcggactacaagtatgctgatagggctcctcaatatgctgcgcatccagaatgcggcactcatgtacgagtaccttctaacacccacggagctcacagtatggccactgggtatggataccgtggccaacttgctcattgcgcaggagaatgctgcactggtgggattaattcagctagggccctcgtcgaattttacgagcagacatgtggtgaaaggcatacctgtgagcttgctgctcgatggtgaggattgggagttcgagatccctgtgcaagctggcatgtccagcttccctttcaactggactcgggtcaggattcggcacctggagatgcaatttgcgcaggaggcgagtggtggtgacgagattatccaccagccttccacccggtcggggattgtttacatcctcctgcagggctccactatcttccatgaccgcagaagagatgaggtgatgacctttcaggcagcggacccgctcaacttccaatatgcgtaccgcctcgacactggcgaagccactctaacgaatgagccctcggaagagtttgcgaacacgttcatgcagatgacacccttcactcgctggaggcttcgtctctctgcgtccgcctcagagaatgcagaattagcgtttccaacagctacagctcccgactccactaccgaggttgtcatcacgttccatgttacggcaatcagacaagttgactggcggcaggaggagaaagaggaggag

SEQ ID NO: 23 - protein, 691 aa, Adiantum trapeziforme
MDYSTLYRDLNQISIGVDRVEFSEVMVIHRMYVRLSDLNVGELPGAGRVKRVYVFADVVELAPRATLRDQMHMPGSVTVIVLCRLLQFPIDGSQATTLRLPFMQLHARVIEQNVKSEITATDGMNWGIYIYGEKVERSPLLPSNAILAVWADRCTITSARHNHVNAPGRIISTFTLGSGVTGITSMHGEPSLDPWNGVSLDSASPTAFSALPRQSRNISFTSIPVEVVTDPSILLGMQTTVLIAELVKVCRPPSPDMMSAVAEHALWLNDVLLQVVQKESQMQGTAPYNECLALLGRIECVMKIGRFVSVVPQLQYRMYGNLIKQMAQVAQNYDQEFKQFKLFIIQNQIFGSYLLQQNKAFADRELQMESFHSAVISQRRQELNTAIAKMERMSLQMEEENRAMEQAQKEMEEGLREFQNRQVARAVFAVLKAVAMIALAFVTAGATAPGAAASAGQAVSIALMYEYLLTPTELTVWPLGMDTVANLLIAQENAALVGLIQLGPSSNFTSRHVVKGIPVSLLLDGEDWEFEIPVQAGMSSFPFNWTRVRIRHLEMQFAQEASGGDEIIHQPSTRSGIVYILLQGSTIFHDRRRDEVMTFQAADPLNFQYAYRLDTGEATLTNEPSEEFANTFMQMTPFTRWRLRLSASASENAELAFPTATAPDSTTEVVITFHVTAIRQVDWRQEEKEEE

SEQ ID NO: 24 - DNA, 2073 bp, Adiantum trapeziforme
  source 1..2073: mol_type = other DNA
atggattacagcacgctttacagggacctgaaccagataagcatcggtgtggaccgggtagagttctcagaggtgatggtgatccacaggatgtatgtaaggttgtctgatctgaatgtgggggagctccccggagccgggagagtgaagcgggtgtacgtgtttgcggatgtggtggagcttgcaccgcgtgcgacgctgcgggatcagatgcatatgccaggatcggtgacagtgatcgtattgtgtcgtcttcttcaatttccaatcgatgggtcgcaagctacaactctccggctgcctttcatgcagttgcatgccagagtcatagagcaaaatgtaaagtcggagataacagcaacagatggcatgaattggggaatctacatatacggggagaaagtagagaggagcccgctccttcctagcaatgcaatccttgcagtttgggcagatcgctgtactataacctcagcccgtcacaatcatgttaacgcacctgggagaataatatcgactttcacacttgggtcgggagtaacgggtataacctctatgcacggggaacccagtttggacccttggaatggtgtttctctcgactcagcttcccctacggcatttagtgctttacctcgccaaagtaggaatatatccttcacaagtattccagtagaggtggtgactgatcctagcatcttgctgggcatgcagaccaccgtgctaattgcggagctagtcaaggtatgtcgcccaccatcacccgacatgatgagtgctgtagcggagcacgcgctttggctcaatgatgtcttacttcaagttgtccagaaagaatcgcagatgcaagggactgcgccctacaacgagtgccttgcacttttgggtcgcattgaatgtgtgatgaaaatcgggagatttgtctcagtagtgcctcagctgcaatacagaatgtatggtaacctcatcaaacaaatggcccaagtagcacaaaactacgaccaagaattcaagcaattcaagttattcatcatccaaaaccaaatctttggcagctatttgcttcagcagaacaaggcatttgctgacagggagctgcagatggagagctttcattcagcggtcatttctcaaagaaggcaggagttgaatactgccatcgcaaagatggagcgaatgagcttgcaaatggaggaagagaatagagcaatggagcaagctcaaaaggaaatggaagaaggattgagggagttccagaataggcaagttgcaagggccgtatttgccgttcttaaagccgtagctatgattgcgcttgcattcgtcacggctggtgcgacggctcctggagctgcggcgtccgcggggcaagctgtgagcatagcactcatgtacgagtaccttctaacacccacggagctcacagtatggccactgggtatggataccgtggccaacttgctcattgcgcaggagaatgctgcactggtgggattaattcagctagggccctcgtcgaattttacgagcagacatgtggtgaaaggcatacctgtgagcttgctgctcgatggtgaggattgggagttcgagatccctgtgcaagctggcatgtccagcttccctttcaactggactcgggtcaggattcggcacctggagatgcaatttgcgcaggaggcgagtggtggtgacgagattatccaccagccttccacccggtcggggattgtttacatcctcctgcagggctccactatcttccatgaccgcagaagagatgaggtgatgacctttcaggcagcggacccgctcaacttccaatatgcgtaccgcctcgacactggcgaagccactctaacgaatgagccctcggaagagtttgcgaacacgttcatgcagatgacacccttcactcgctggaggcttcgtctctctgcgtccgcctcagagaatgcagaattagcgtttccaacagctacagctcccgactccactaccgaggttgtcatcacgttccatgttacggcaatcagacaagttgactggcggcaggaggagaaagaggaggag

SEQ ID NO: 25 - protein, 813 aa, Pteridium aquilinum
MGNSIAAAEARNYEEIYKDANHIGAKSLITPVCSEVMTVCRMYVRLDDLDVKVLERAEEVKVLYVVADVVEVRGDAVQLPPSVQLILSCRVLFFSSGNGWPQVALLQGPLVQYNGNYSPVTGNWSATPLLEQDTYRFFLHGQQLLILSGTSGRASGDNILSEDEKKLQLQSSTAPILPPRWVMEDPHILSGLEASVITSELIVGHMTHAVDLVAEVKLHVEWLLLLLRHVLNETMTNAEANHLLRSLFFRVQSLVRMATAAQNNILVVPRLQHHAYSEYINRLAELARTYDSDFKALTLFIQQNEILGSYLLEQNKAFAEKERDMEVVYTTLNDIKMSELIQALGQLERLGEEMGKMSEEMEQAREDMEKGLKIYRNKQVARAAFSLLNAIAQIGLAIFTAGATTGLAASAVANAGQAITQATEAVQQLRRIFETIEKILLLAEVLVAMRDLLAAINDGGELGTLPEWPEMPTTTEWEIFENEVEAVAAGMPEEVSETLVWKAKCKNVAAIGREMVTQAMLVSQLEYDIKVHSLLQEVAQNQAARLEAIQPTDLIDYQEMAAQLDMRTSRILLSLLQVLALQNGALTYSYLMPRTSLSARSVSATMSAVWGLLLHQGQATLVALGELGSPSTRSVEYVVKGIPVGLLLDGEDWDFTIPVADTLHFPSTWSRVRISHVEMKFVKTGGTAAGRDEELVHQPTTDTGKVYIVLRSELFFQDRRKGQYFKYEATVPAIYHYAYNLATSETTEDNRPDEEFARVFMRMTPFTRWKLRVSTSARENQGLAFPTAITPDATTQIVIRFYLSAIRDFDWNR

SEQ ID NO: 26 - protein, 877 aa, synthetic construct
  REGION 1..877: note = Synthetic
MALVDYGKLFEDLNQISMGVLDRVEFSEVMVIHRMYVRLADLNVGQLEGAEKVKRLYVFADVVELPVVEWRWPPQIPGSVTVIILCRLLQWPTDGRQSDTELHLTFMKLHAIQREENRWEITAADGMNWGVYIHAEEVQVGVLTMSWSSVLRVSALRSVITSGFRAVSVFEVPGSVRSTLGATLRPDHALYSTTMQATPNASHISAFNLRIVSPSAYRVCPLQNDTDTYLGIPADVAAVLPVDVVTDPNILLGMQTTVHIAELVKACHPSPDVVSAVGEHLNWLNKLLLPLKESTQLQGSESYKECLALLGRVHAAMKMVRIGLVVPQLQYRMYGSLINQMAQVAQNYDREFKQFKLFIIQNQILGSYLLQQNRAFAERELQMESFHAAVISQRREELDNTFAKMDRLSGQMEAESSAMEQAKKEMDEGLRQFQNRQVANALFAVLSAVAQIGLAFLTAGATAPGAVASAGQAVSIAGQAAQGLRRVVEILEQLEAVMEVVAAVKDLVDSLEQVGQIVDAPVMPELPSEADWSIFVNEVEAVAEGMPTEVSEVPVWRAKCKNVAALGREMSITAVQMSELQYDIWVQGMMRDMARSQADRLAAIQPADLTNYLEMATQMDMRTTRMLLGLLNILRIQNAALRYEYLLMPTELTTWPLGMDTVGDLLIAQENAALIGLMQLGPSSDFTSRHVVKDIPVNLLLDGEDWEFEIPVQAGMSSFPSSWSRVRIRHLEMHFVKEASGIGGEIIHQPTTQTGTVYILLQGSTIFHDRRRDQVLPFQAAAPLNYHYAYRLDTGDSTLTNEPSEQFANKFMQMTPFTRWRLRLSASAKENAGLAFPTATALDSTTQIVITFHVTAIRQIDWRHDEEHHHHHHHHHH

SEQ ID NO: 27 - DNA, 2631 bp, synthetic construct
  misc_feature 1..2631: note = Synthetic
  source 1..2631: mol_type = other DNA
atggctctcgtggattacggcaagcttttcgaggatctgaaccagataagcatgggtgtactggatcgggtagagttttcagaggtgatggtgatccacaggatgtatgtgaggctagctgatctgaatgtggggcagctcgagggagccgagaaagtgaagcggttgtatgtgtttgcggacgtggtggagctaccagtcgtggaatggcggtggccgccgcaaataccaggatcggtgacggtgatcatattgtgtcgtcttcttcaatggccaactgatgggaggcagtcggacaccgagctccacctgacattcatgaagttgcatgccatacaacgagaggaaaatcggtgggagataaccgcagcagatggcatgaactggggagtttacatacacgcagaggaagtacaggttggcgtgctgacaatgtcatggtcttcggtacttagagtttcggcacttcgctctgttataacctccggctttcgcgccgttagtgtgtttgaggtaccgggaagtgtaaggtccacccttggagctactttaaggcccgatcacgccttatatagtacaactatgcaagccacacccaacgcatcgcatattagtgcttttaaccttcgcatagtttccccgtcggcatatcgtgtttgtcctctccaaaatgacacagatacctacttaggtattccagcagacgtggcggcagttcttccagtagacgtggtgactgatcctaacatcttgctgggcatgcagacaacggtacacattgcggagctagtcaaggcatgtcatccgtcacccgatgttgtgagcgctgtaggggagcacctgaactggctcaacaaactcttactcccacttaaggaatcgactcagttgcaaggaagcgagtcgtacaaggagtgccttgcactcttgggtcgtgttcacgctgcgatgaagatggtgagaattggcttagtagtgccccagctgcaatacagaatgtacggtagcctcatcaaccaaatggcccaagtagcacaaaactacgaccgagaattcaagcaattcaaattattcatcatccaaaatcaaatccttggcagctatttgctgcagcagaacagggcatttgctgagagggagctgcagatggagagctttcatgctgctgtcatttctcaaagaagggaggagttggacaatacattcgcaaagatggaccgattgagcgggcaaatggaggcagagagtagtgcaatggagcaagccaaaaaggaaatggacgaaggattgaggcagttccagaataggcaagttgcgaacgccctctttgccgttcttagcgctgtagctcagattgggcttgcattccttacggctggtgcaacggctcctggagctgtggcgtcggcggggcaagctgtgagcatagcaggtcaggcggcgcaaggtctgcgaagggtggtggaaattctagagcagctggaggctgtgatggaggttgtggctgctgtgaaggacctcgtggattcattggaacaggtaggtcagattgtggacgcaccggtgatgccggaattgccctcagaggcggactggtccatttttgtgaacgaggtggaggccgtggcagagggcatgccaacggaagtctcggaggttccggtgtggagggccaagtgcaagaatgtggctgcactgggtcgggagatgagcatcacggcagtacagatgtcggagctgcagtatgacatctgggtgcaaggcatgatgcgggatatggctcgaagccaggcagacaggctggccgcaattcaacccgcggaccttaccaactatttggagatggctacccagatggatatgcggactacgaggatgctgctggggctcctcaacatattgcgcatccagaatgcggcgctcaggtacgagtatcttctaatgcccacggagctcacaacatggccactgggtatggataccgtgggtgacttgctcatcgcgcaggagaatgctgcactgataggattaatgcagctagggccctcatctgatttcacgagcaggcatgtggtgaaagacatacctgtgaacttgctgctcgatggcgaggattgggagtttgagattcctgtgcaagctggcatgtccagcttcccttccagctggtctcgcgtccgtattcggcacctggagatgcactttgtgaaggaggccagcggtattggtggtgagattatccaccagcctaccacccagactgggaccgtttacatccttctgcagggttccactatcttccatgaccgcagaagagaccaggtgttgccttttcaggccgctgctccgctcaactaccattacgcgtaccgcctcgacaccggcgactccactctcacaaacgaaccctctgaacagtttgccaacaagttcatgcagatgacacccttcacccgttggaggcttcgtctgtctgcgtccgcaaaagagaatgcaggattagcctttcccacggctacagcacttgactccactacccagattgtcatcactttccatgttacggccatcagacaaattgactggcggcacgacgaagagcaccatcaccatcaccatcaccatcaccat

SEQ ID NO: 28 - DNA, 2604 bp, synthetic construct
  misc_feature 1..2604: note = Synthetic
  source 1..2604: mol_type = other DNA
atggctgcactggtcgactacggcaagctgttcgaggacctcaaccagatctcgatgggagtcctggaccgcgtcgagttctccgaggtgatggtgatccaccgcatgtacgtccgccttgccgacctgaacgtcggacagctggagggagccgagaaggtcaagcgcctgtacgtgttcgcggatgtcgtcgagctgccggtcgtcgagtggaggtggccacctcagatcccaggttccgtgaccgtgatcatcctctgccggctcctccagtggccgacagacggcaggcagtctgacaccgagctgcacctgaccttcatgaagctgcacgccatccagcgcgaggagaaccgctgggagatcaccgctgccgacggcatgaactggggtgtgtacatccacgccgaggaggtccaagtgggcgtcctcacgatgtcctggtcgagcgtgctgagggtttccgcgctcaggtcggtcatcaccagcggattccgggcggtcagcgtgttcgaggttcccggatctgtgaggagcacgctgggtgccaccttgaggcctgatcacgcgctgtactcgaccaccatgcaagccacgcccaacgccagccacatctcggccttcaacctgcgcatcgtgagcccgtcagcctatcgcgtgtgtccgctccagaacgacaccgacacctacctgggcatccctgcagatgtcgcagccgttctcccggtcgacgtcgttaccgacccgaacatcctgctgggcatgcagaccaccgtccacatcgccgagctcgtgaaggcttgccacccgtctcctgacgtcgtctcggcggtcggagagcacctgaactggctgaacaagctcctcctgccgctcaaggagtcgacgcagctccaaggctccgagtcctacaaggagtgcctcgccctcctcggacgggttcacgccgcgatgaagatggtgcgcatagggctggtggtccctcagctgcagtaccgcatgtacgggagcctgatcaaccagatggcccaggtggcccagaactacgaccgcgagttcaagcagttcaagctgttcatcatccagaaccagatcctcgggtcgtacctcctgcagcaaaaccgggcgttcgctgagagggagctgcagatggagtccttccacgccgccgtgatctcccagaggcgggaggagctcgacaacacgttcgcgaagatggaccgcctgtccgggcagatggaggcggagtcctcggcgatggagcaggccaagaaggagatggacgagggcctcaggcagttccagaaccggcaggtcgcgaacgcactcttcgccgtgttgtccgcagtggctcagataggcctcgccttcctgaccgcaggcgctacagccccaggagcggttgccagcgctggacaagcggtctcgatcgcaggtcaggctgcacagggactcagacgcgtggtggagatcctggagcagctggaggccgtcatggaggtcgtggcagccgtgaaggacctcgtcgacagcctcgagcaggtcggtcagatcgtcgacgctccagtcatgcccgagttgccgagcgaagccgactggtccatcttcgtcaacgaggtggaggcagtggcagagggtatgcccaccgaggtctctgaggtgcccgtgtggagggcgaagtgcaagaacgtcgctgccttgggccgcgagatgtcgatcacggccgtgcagatgtccgagctccagtacgacatctgggtccaagggatgatgcgcgacatggcgaggagccaggctgatcgcttggccgcgatccagccagcggacctcacgaactacctggagatggcgacccagatggacatgcggacgacccgcatgctgctcgggctcctgaacatcctccgcatccagaacgcggccctgcgctacgagtacctgctgatgcccaccgagctgaccacctggccgttgggtatggacaccgtcggcgacctcctgattgcgcaggagaacgccgcgctcatcggactgatgcagctcggcccatcgtccgacttcaccagcaggcacgtcgtcaaggacatccccgtgaacctgctgctcgacggcgaggactgggagttcgagatcccagttcaggccggcatgagctcgttcccgtccagctggagcagggtccggatacgccacctcgagatgcacttcgtgaaggaggcctcgggcatcggaggcgagatcatccaccagccgaccacgcagacgggcacggtgtacatcctgctgcaaggctcgaccatcttccacgaccgcagacgcgaccaggtcctcccgttccaagccgcagcaccgctgaactaccactacgcgtaccgccttgacaccggtgactccaccttgaccaacgagcccagcgagcagttcgcgaacaagttcatgcagatgaccccgttcacccgctggaggctgaggctctccgcatctgcgaaggagaacgcgggtcttgcgttcccaacggcaacggccctcgactccacgacgcagatcgtcatcaccttccacgtcaccgcgatcaggcagatcgactggcgccacgacgaggag

SEQ ID NO: 29 - DNA, 2604 bp, synthetic construct
  misc_feature 1..2604: note = Synthetic
  source 1..2604: mol_type = other DNA
atggcagcactggtggactacggcaagctcttcgaggacctcaaccagatctctatgggcgtcctggaccgggtcgagttcagcgaggtgatggtgatccaccggatgtacgtgaggctcgccgaccttaacgtgggccagctcgagggtgccgagaaggtgaagcggctgtacgtcttcgccgacgtggtcgagctgccagtggtcgagtggaggtggcctccgcagatcccgggtagcgtgaccgtcatcatcctctgccgcctgcttcagtggcccactgacggacggcagtcagacaccgagctgcacctcaccttcatgaagctgcacgcgatccagcgggaggagaaccggtgggagatcacggcagccgacggcatgaactggggcgtctacatccacgcggaggaggtccaagtgggcgtgctgacgatgtcgtggtcgagcgtgctcagggtttccgcgctgaggagcgtcatcaccagcggctttcgggcagtgtccgtcttcgaggtgccaggctcagtcaggtccacgctcggagccaccctcagacccgatcacgcgctctactccaccaccatgcaagccacgccgaacgcgtcccacatcagcgcgttcaacctccggatagtcagcccatccgcctatcgcgtctgcccgctgcagaacgacaccgacacgtacctcggcattcccgcagacgttgccgcagtcctgcccgtcgatgtggtcaccgacccgaacatcctgctcggcatgcagacgacggtgcacatcgctgagctcgtcaaagcctgccaccctagcccagatgtggtgtcagccgtcggagagcacctgaactggctcaacaagctcctgctgccgctcaaggagtcgacccagctgcaagggtcggagtcctacaaggagtgcctcgcgctgctcggacgggttcacgccgccatgaagatggtccggatcgggttggtcgtgccacagctccagtaccggatgtacggctcgctcatcaaccagatggcccaggtggcccagaactacgaccgggagttcaagcagttcaagctgttcatcatccagaaccagatcctcggctcgtacctgctgcagcagaaccgggcgttcgctgagagggagctgcagatggagtcgttccacgcagccgtgatctcgcagaggcgcgaggagctggacaacaccttcgcgaagatggaccgcctcagcggccagatggaagccgagtcgtccgcgatggagcaggcgaagaaggagatggacgagggcctccggcagttccagaaccggcaggtggcgaacgccctcttcgctgtgcttagcgccgtggctcagatcgggttggcgtttctcaccgccggagccacagctcctggtgcagtggcgtcagcaggtcaagcggtctcgatagccggccaggcagcgcaagggctgaggagggtggtcgagatcctcgagcagctcgaagccgtcatggaggtggtcgccgctgtcaaggacctggtggacagcctcgagcaagtcggccagatcgtggacgcgccagtgatgcccgagttgcccagcgaagcggactggtccatcttcgtgaacgaggtggaggcggtggcagagggcatgcctaccgaggtgagcgaggtgccagtctggagggcgaagtgcaagaacgtcgcggcgctgggtcgggagatgtcgatcaccgcggttcagatgtcggagctccagtacgacatctgggtgcaagggatgatgcgggacatggcgaggtcgcaagccgatcgccttgctgcgatccagcctgccgacctgacgaactacctggagatggccacccagatggacatgcggaccacgcgcatgctcctcggcctgctcaacatcctccgcatccagaacgcggcgctccgctacgagtacctgctgatgcccaccgagctcacgacctggccactcggcatggacaccgttggcgacctcctcatcgcccaggagaacgcggccctcatagggctcatgcagctgggaccgtcgagcgacttcacctcgaggcacgtggtcaaggacatccccgtcaacctgctcctggacggcgaggactgggagttcgagatcccggttcaagccggcatgtcctcgttcccgtcgagctggtcgagagtgcgcatccggcacctggagatgcacttcgtgaaggaggccagcgggataggcggtgagatcatccaccagcccacgacgcagaccggcaccgtgtacatcctcctccaagggtccacgatcttccacgaccggaggcgggatcaggtcttgcccttccaagcggctgcacctctgaactaccactacgcgtatcggctggacaccggcgactcgaccctcaccaacgagccgtccgagcagttcgcgaacaagttcatgcagatgacgcccttcacgcgctggaggctgaggttgtccgcatccgccaaggagaacgctggactcgcctttccgaccgctacggcactcgactccacgacccagatcgtgatcacgttccacgtcaccgccatccgccagatcgactggcggcacgacgaggag

SEQ ID NO: 30 - DNA, 26 bp, synthetic construct
  misc_feature 1..26: note = Synthetic
  source 1..26: mol_type = other DNA
ccatggctctcgtggattacggcaag

SEQ ID NO: 31 - DNA, 30 bp, synthetic construct
  misc_feature 1..30: note = Synthetic
  source 1..30: mol_type = other DNA
gttaacctactcttcgtcgtgccgccagtc

SEQ ID NO: 32 - DNA, 41 bp, synthetic construct
  misc_feature 1..41: note = Synthetic
  source 1..41: mol_type = other DNA
tttaacttagcctaggatccatggaatatagcagcttgtac

SEQ ID NO: 33 - DNA, 42 bp, synthetic construct
  misc_feature 1..42: note = Synthetic
  source 1..42: mol_type = other DNA
actccttctttagttaacttactccacatcaccctcttgtcg

SEQ ID NO: 34 - protein, 809 aa, Asplenium australasicum
MAAGDYSVLYQDVNQISIRLEKMDFSEVMAVHRMFVRMDDLDVSSGTGLLSGAEKVKRLYVFADVVELPSKQLRLPGTDLIVILCRIFVTNGRHSTELFLPSMNMSMVAPGTGSIRGVILSPTTVLTTSSDALQFKLQSGSMTSVMRLKDVSVAATLTCNVQAASASMPLTVKTTGTSPGNICVLGMSTAVVVPESAVAVITDANILLGMQVTVLIAELVKIAHNSDVLIAAVTRHVEWLNHLLVQAHAAAPSEDVVALLYRTQGFIKLRNEGLIVPRLQYRMYKDLIDRMVQVAQSYDQDFKQLKLFVEQNKILGSYLLEQNKAFAEKEKDMDAFHSQVIDLRTSELESTIERMDDLSKQMEEQNAAMEQAKADMDAGLIAYQNKQVANAVFAVLGAIASIGLAFATGGATAPGAVASAGAAVTAAGKAAEGLKKVVEILEGLQAVMEVVAVIKELVQSLQEIGQLVDAPEMPDLPSDAEWEIFVNEVEAVAEQMPTEVTEVPAWKAKCKNVAALGREMSTMAAHIAELQFEIQVQEMLREIAKKQADRLSSIKPADLTNYLEMVSEMDMRTTRMLLELIRVLYIQNAALQYEYLQTPAPLNAWPVTMQTVWGLLVQQETAAINGLLQMGAPSDYTQEYAVRDVPVRLLLGGGDWEFELPVRNADFPLTWCRVRIRYVDMRFDAAAEHLPVTSTGEVYMLLQSSRFFEDRAKRENEFISYEGGMGLQYQYAYRLATGDATVTNVPSEEYANTFMRLAPFTRWRLRLSASAPENKGLAFPTATLADATTRIKITFHVSAIRRISTRVAV

SEQ ID NO: 35 - protein, 807 aa, Microsorum musifolium
MADLDYSKLYQDLNQISVRLEKTEFSEVMVVHRMFVRMDDLDVSSGSGLLSGAEKVKRLYVFADVVELPSKQVRLAGTDMIVVFCRIFVPEGRHYAELFLPSMNMSMVGADGEGSIRGVILSPTVLTTLSNALQFRLECGSMTSVMRLNDVSAGATLTCNVQAASACVPLKVKTTGTSPGNICVLGLSTAAVVPESVVAVITDANILLGMQVTVLIAELVKIAHNSDGVIAAVTRHVEWLNHLLVQAQAAAPSEDVVALLYRTQAFIKLRKEGLIVPRLQYHMYKDLIDRMVQVAQSYDQDFKQMKLYVEQNKILGSYLLEQNKAFAEKEKDMDASHSQVIALRTSELQSTIERMDDLSKQMEVQSTAMEKAKADMDAGLIVYQNKQVADAVFAVMEAIASIGLAFATGGATAPGAVASAGAAVSAAGKAGEGLKKVVEILEGLQAIMEVIAAIKGLVQSLQKIGQLVNAPEMPDLPSEAEWEMFVKEVEAVAAQMPTEVTQVPAWTAKCKNVAALGREMSTTAAHIAELQYEIQVQGMLQQIAKKQADRLSSIKPADLTNYFEMVSEMDMRTTRMLLELIQVLNIQNGALRYEYLQPAAPLNAWPVTMQTVWGLLVQQEAAAINGLLQLGAPSDFTREYVVGDIPVKLLLGGGDWEFELPVTDADFPLTWCRVRIQHVDMQFDAAAEHLPTTSTGEVYMLLQSSRFFEDRAQHEDEFISYEAGTGLQYQYAYRLATGEATVTNVPSEAYVNTFMLLAPFTRWRLRLSSSAPENKGLAFPTATSADATTRIKITFHVSAIRRISLAR

SEQ ID NO: 36 - protein, 813 aa, Adiantum pedatum
MADIDYSVLYNDVNQISIRLERMDFSEVMAVHRMFVRMDDLDVSSGTGVLEGAQNVKRLYVFADVVELPSKQVRLPGSDMIVILCRIFVRNGRHNTELFLPSMNMSMVAAGNGTIRGVNLSTTMSSSSSNALQFNLRSGSMTSTVRLKDVDVAAALTCDVQAASASMPLTVMTTGTSPGNIWVLGMTTAVVIPESAVAVITDANILLGMQVTVLIAELVKTAHNSDVIIAAITRHVEWLNHLLVQAHAAAPNEDVITLLYRTQAFIKLKREGLVVPRLQYHMYKNLIDRMVQVAQNYDQDFRQLKLFVEQNKILGSYLLEQNKAFAEKEKDMDAFHSQIIALRTTELNNTIERMGELSKQMDQENEAMEQAKADMDAGLIEYQNRQVANALFAVLGAIASIGLAFATGGATAPGAVSAAGAAVTAAGKAAEGLKKVVEILEGLQVVMEVVAAIKELVQSLQQIGQLVDAPEMPDLPSNADWEIFVNEVEAVAEQMPTEVTQVAAWKAKCKNVAALGREMSTMAAHIAELQYQIQVQEMLREIAQKQADRLSSISPADLTNYLEMVSQMDMRTTRMLLELIRVLYIQNAALQYEYLQTPAPLNAWPVAMQTVWGLLIQQETTAITGLLQLGAPSDFTQEYVVKDIPVSLLLEGRDWEFELPVLNADFPSTWSRVRIHHVDMQFDAAATSIHIPTTNTGVVYLLLQSSRFFDDRARRANEFISYEAGTGLFYQYAYRLATGEATVTNIPTDEYANTFMRLTPFTRWRLRLSLSAEENAGLAFPTATSADDTTQIKITFHVSAIRRISTRSDGVSS

SEQ ID NO: 37 - DNA, 44 bp, synthetic construct
  misc_feature 1..44: note = Synthetic
  misc_feature 22..23: note = n is a, c, g, or t
  source 1..44: mol_type = other DNA
cagctcgagggagccgagaaannkaagcggttgtatgtgtttgc

SEQ ID NO: 38 - DNA, 13 bp, synthetic construct
  misc_feature 1..13: note = Synthetic
  source 1..13: mol_type = other DNA
ttttttttttttt

SEQ ID NO: 39 - DNA, 43 bp, synthetic construct
  misc_feature 1..43: note = Synthetic
  misc_feature 20..21: note = n is a, c, g, or t
  source 1..43: mol_type = other DNA
cgagggagccgagaaagtgnnkcggttgtatgtgtttgcggac

SEQ ID NO: 40 - DNA, 43 bp, synthetic construct
  misc_feature 1..43: note = Synthetic
  misc_feature 23..24: note = n is a, c, g, or t
  source 1..43: mol_type = other DNA
gtccgcaaacacatacaaccgmnncactttctcggctccctcg

SEQ ID NO: 41 - DNA, 44 bp, synthetic construct
  misc_feature 1..44: note = Synthetic
  misc_feature 21..22: note = n is a, c, g, or t
  source 1..44: mol_type = other DNA
agggagccgagaaagtgaagnnkttgtatgtgtttgcggacgtg

SEQ ID NO: 42 - DNA, 44 bp, synthetic construct
  misc_feature 1..44: note = Synthetic
  misc_feature 23..24: note = n is a, c, g, or t
  source 1..44: mol_type = other DNA
cacgtccgcaaacacatacaamnncttcactttctcggctccct

SEQ ID NO: 43 - DNA, 42 bp, synthetic construct
  misc_feature 1..42: note = Synthetic
  misc_feature 21..22: note = n is a, c, g, or t
  source 1..42: mol_type = other DNA
gagccgagaaagtgaagcggnnktatgtgtttgcggacgtgg

SEQ ID NO: 44 - DNA, 42 bp, synthetic construct
  misc_feature 1..42: note = Synthetic
  misc_feature 21..22: note = n is a, c, g, or t
  source 1..42: mol_type = other DNA
ccacgtccgcaaacacatamnnccgcttcactttctcggctc

SEQ ID NO: 45 - DNA, 44 bp, synthetic construct
  misc_feature 1..44: note = Synthetic
  misc_feature 21..22: note = n is a, c, g, or t
  source 1..44: mol_type = other DNA
ccgagaaagtgaagcggttgnnkgtgtttgcggacgtggtggag

SEQ ID NO: 46 - DNA, 44 bp, synthetic construct
  misc_feature 1..44: note = Synthetic
  misc_feature 23..24: note = n is a, c, g, or t
  source 1..44: mol_type = other DNA
ctccaccacgtccgcaaacacmnncaaccgcttcactttctcgg

SEQ ID NO: 47 - DNA, 46 bp, synthetic construct
  misc_feature 1..46: note = Synthetic
  misc_feature 22..23: note = n is a, c, g, or t
  source 1..46: mol_type = other DNA
gagaaagtgaagcggttgtatnnktttgcggacgtggtggagctac

SEQ ID NO: 48 - DNA, 46 bp, synthetic construct
  misc_feature 1..46: note = Synthetic
  misc_feature 24..25: note = n is a, c, g, or t
  source 1..46: mol_type = other DNA
gtagctccaccacgtccgcaaamnnatacaaccgcttcactttctc

SEQ ID NO: 49 - DNA, 43 bp, synthetic construct
  misc_feature 1..43: note = Synthetic
  misc_feature 21..22: note = n is a, c, g, or t
  source 1..43: mol_type = other DNA
aagtgaagcggttgtatgtgnnkgcggacgtggtggagctacc

SEQ ID NO: 50 - DNA, 43 bp, synthetic construct
  misc_feature 1..43: note = Synthetic
  misc_feature 22..23: note = n is a, c, g, or t
  source 1..43: mol_type = other DNA
ggtagctccaccacgtccgcmnncacatacaaccgcttcactt

SEQ ID NO: 51 - DNA, 46 bp, synthetic construct
  misc_feature 1..46: note = Synthetic
  misc_feature 22..23: note = n is a, c, g, or t
  source 1..46: mol_type = other DNA
gtgaagcggttgtatgtgtttnnkgacgtggtggagctaccagtcg

SEQ ID NO: 52 - DNA, 46 bp, synthetic construct
  misc_feature 1..46: note = Synthetic
  misc_feature 24..25: note = n is a, c, g, or t
  source 1..46: mol_type = other DNA
cgactggtagctccaccacgtcmnnaaacacatacaaccgcttcac

SEQ ID NO: 53 - DNA, 47 bp, synthetic construct
  misc_feature 1..47: note = Synthetic
  misc_feature 23..24: note = n is a, c, g, or t
  source 1..47: mol_type = other DNA
gaagcggttgtatgtgtttgcgnnkgtggtggagctaccagtcgtgg

SEQ ID NO: 54 - DNA, 47 bp, synthetic construct
  misc_feature 1..47: note = Synthetic
  misc_feature 24..25: note = n is a, c, g, or t
  source 1..47: mol_type = other DNA
ccacgactggtagctccaccacmnncgcaaacacatacaaccgcttc

SEQ ID NO: 55 - DNA, 42 bp, synthetic construct
  misc_feature 1..42: note = Synthetic
  misc_feature 21..22: note = n is a, c, g, or t
  source 1..42: mol_type = other DNA
ggttgtatgtgtttgcggacnnkgtggagctaccagtcgtgg

SEQ ID NO: 56 - DNA, 42 bp, synthetic construct
  misc_feature 1..42: note = Synthetic
  misc_feature 21..22: note = n is a, c, g, or t
  source 1..42: mol_type = other DNA
ccacgactggtagctccacmnngtccgcaaacacatacaacc

SEQ ID NO: 57 - DNA, 44 bp, synthetic construct
  misc_feature 1..44: note = Synthetic
  misc_feature 21..22: note = n is a, c, g, or t
  source 1..44: mol_type = other DNA
tgtatgtgtttgcggacgtgnnkgagctaccagtcgtggaatgg

SEQ ID NO: 58 - DNA, 44 bp, synthetic construct
  misc_feature 1..44: note = Synthetic
  misc_feature 23..24: note = n is a, c, g, or t
  source 1..44: mol_type = other DNA
ccattccacgactggtagctcmnncacgtccgcaaacacataca

SEQ ID NO: 59 - DNA, 43 bp, synthetic construct
  misc_feature 1..43: note = Synthetic
  misc_feature 21..22: note = n is a, c, g, or t
  source 1..43: mol_type = other DNA
atgtgtttgcggacgtggtgnnkctaccagtcgtggaatggcg

SEQ ID NO: 60 - DNA, 43 bp, synthetic construct
  misc_feature 1..43: note = Synthetic
  misc_feature 22..23: note = n is a, c, g, or t
  source 1..43: mol_type = other DNA
cgccattccacgactggtagmnncaccacgtccgcaaacacat

SEQ ID NO: 61 - DNA, 43 bp, synthetic construct
  misc_feature 1..43: note = Synthetic
  misc_feature 21..22: note = n is a, c, g, or t
  source 1..43: mol_type = other DNA
tgtttgcggacgtggtggagnnkccagtcgtggaatggcggtg

SEQ ID NO: 62 - DNA, 43 bp, synthetic construct
  misc_feature 1..43: note = Synthetic
  misc_feature 22..23: note = n is a, c, g, or t
  source 1..43: mol_type = other DNA
caccgccattccacgactggmnnctccaccacgtccgcaaaca

SEQ ID NO: 63 - DNA, 45 bp, synthetic construct
  misc_feature 1..45: note = Synthetic
  misc_feature 23..24: note = n is a, c, g, or t
  source 1..45: mol_type = other DNA
gtttgcggacgtggtggagctannkgtcgtggaatggcggtggcc

SEQ ID NO: 64 - DNA, 45 bp, synthetic construct
  misc_feature 1..45: note = Synthetic
  misc_feature 22..23: note = n is a, c, g, or t
  source 1..45: mol_type = other DNA
ggccaccgccattccacgacmnntagctccaccacgtccgcaaac

SEQ ID NO: 65 - DNA, 55 bp, synthetic construct
  misc_feature 1..55: note = Synthetic
  misc_feature 32..33: note = n is a, c, g, or t
  source 1..55: mol_type = other DNA
caagcaattcaaattattcatcatccaaaatnnkatccttggcagctatttgctg

SEQ ID NO: 66 - DNA, 53 bp, synthetic construct
  misc_feature 1..53: note = Synthetic
  misc_feature 21..22: note = n is a, c, g, or t
  source 1..53: mol_type = other DNA
gcaaatagctgccaaggatmnnattttggatgatgaataatttgaattgcttg

SEQ ID NO: 67 - DNA, 53 bp, synthetic construct
  misc_feature 1..53: note = Synthetic
  misc_feature 32..33: note = n is a, c, g, or t
  source 1..53: mol_type = other DNA
gcaattcaaattattcatcatccaaaatcaannkcttggcagctatttgctgc

SEQ ID NO: 68 - DNA, 53 bp, synthetic construct
  misc_feature 1..53: note = Synthetic
  misc_feature 21..22: note = n is a, c, g, or t
  source 1..53: mol_type = other DNA
gcagcaaatagctgccaagmnnttgattttggatgatgaataatttgaattgc

SEQ ID NO: 69 - DNA, 56 bp, synthetic construct
  misc_feature 1..56: note = Synthetic
  misc_feature 35..36: note = n is a, c, g, or t
  source 1..56: mol_type = other DNA
gcaattcaaattattcatcatccaaaatcaaatcnnkggcagctatttgctgcagc

SEQ ID NO: 70 - DNA, 56 bp, synthetic construct
  misc_feature 1..56: note = Synthetic
  misc_feature 21..22: note = n is a, c, g, or t
  source 1..56: mol_type = other DNA
gctgcagcaaatagctgccmnngatttgattttggatgatgaataatttgaattgc

SEQ ID NO: 71 - DNA, 52 bp, synthetic construct
  misc_feature 1..52: note = Synthetic
  misc_feature 32..33: note = n is a, c, g, or t
  source 1..52: mol_type = other DNA
caaattattcatcatccaaaatcaaatccttnnkagctatttgctgcagcag

SEQ ID NO: 72 - DNA, 52 bp, synthetic construct
  misc_feature 1..52: note = Synthetic
  misc_feature 20..21: note = n is a, c, g, or t
  source 1..52: mol_type = other DNA
ctgctgcagcaaatagctmnnaaggatttgattttggatgatgaataatttg

SEQ ID NO: 73 - DNA, 48 bp, synthetic construct
  misc_feature 1..48: note = Synthetic
  misc_feature 26..27: note = n is a, c, g, or t
  source 1..48: mol_type = other DNA
catcatccaaaatcaaatccttggcnnktatttgctgcagcagaacag

SEQ ID NO: 74 - DNA, 48 bp, synthetic construct
  misc_feature 1..48: note = Synthetic
  misc_feature 22..23: note = n is a, c, g, or t
  source 1..48: mol_type = other DNA
ctgttctgctgcagcaaatamnngccaaggatttgattttggatgatg

SEQ ID NO: 75 - DNA, 43 bp, synthetic construct
  misc_feature 1..43: note = Synthetic
  misc_feature 23..24: note = n is a, c, g, or t
  source 1..43: mol_type = other DNA
ccaaaatcaaatccttggcagcnnkttgctgcagcagaacagg

SEQ ID NO: 76 - DNA, 43 bp, synthetic construct
  misc_feature 1..43: note = Synthetic
  misc_feature 20..21: note = n is a, c, g, or t
  source 1..43: mol_type = other DNA
cctgttctgctgcagcaamnngctgccaaggatttgattttgg

SEQ ID NO: 77 - DNA, 50 bp, synthetic construct
  misc_feature 1..50: note = Synthetic
  misc_feature 26..27: note = n is a, c, g, or t
  source 1..50: mol_type = other DNA
ccaaaatcaaatccttggcagctatnnkctgcagcagaacagggcatttg

SEQ ID NO: 78 - DNA, 50 bp, synthetic construct
  misc_feature 1..50: note = Synthetic
  misc_feature 24..25: note = n is a, c, g, or t
  source 1..50: mol_type = other DNA
caaatgccctgttctgctgcagmnnatagctgccaaggatttgattttgg

SEQ ID NO: 79 - DNA, 43 bp, synthetic construct
  misc_feature 1..43: note = Synthetic
  misc_feature 22..23: note = n is a, c, g, or t
  source 1..43: mol_type = other DNA
caaatccttggcagctatttgnnkcagcagaacagggcatttg

SEQ ID NO: 80 - DNA, 43 bp, synthetic construct
  misc_feature 1..43: note = Synthetic
  misc_feature 21..22: note = n is a, c, g, or t
  source 1..43: mol_type = other DNA
caaatgccctgttctgctgmnncaaatagctgccaaggatttg

SEQ ID NO: 81 - DNA, 41 bp, synthetic construct
  misc_feature 1..41: note = Synthetic
  misc_feature 20..21: note = n is a, c, g, or t
  source 1..41: mol_type = other DNA
ccttggcagctatttgctgnnkcagaacagggcatttgctg

SEQ ID NO: 82 - DNA, 41 bp, synthetic construct
  misc_feature 1..41: note = Synthetic
  misc_feature 21..22: note = n is a, c, g, or t
  source 1..41: mol_type = other DNA
cagcaaatgccctgttctgmnncagcaaatagctgccaagg

SEQ ID NO: 83 - DNA, 41 bp, synthetic construct
  misc_feature 1..41: note = Synthetic
  misc_feature 19..20: note = n is a, c, g, or t
  source 1..41: mol_type = other DNA
ggcagctatttgctgcagnnkaacagggcatttgctgagag

SEQ ID NO: 84 - DNA, 41 bp, synthetic construct
  misc_feature 1..41: note = Synthetic
  misc_feature 22..23: note = n is a, c, g, or t
  source 1..41: mol_type = other DNA
ctctcagcaaatgccctgttmnnctgcagcaaatagctgcc

SEQ ID NO: 85 - DNA, 40 bp, synthetic construct
  misc_feature 1..40: note = Synthetic
  misc_feature 20..21: note = n is a, c, g, or t
  source 1..40: mol_type = other DNA
cagctatttgctgcagcagnnkagggcatttgctgagagg

SEQ ID NO: 86 - DNA, 40 bp, synthetic construct
  misc_feature 1..40: note = Synthetic
  misc_feature 20..21: note = n is a, c, g, or t
  source 1..40: mol_type = other DNA
cctctcagcaaatgccctmnnctgctgcagcaaatagctg

SEQ ID NO: 87 - DNA, 46 bp, synthetic construct
  misc_feature 1..46: note = Synthetic
  misc_feature 22..23: note = n is a, c, g, or t
  source 1..46: mol_type = other DNA
gaagtctcggaggttccggtgnnkagggccaagtgcaagaatgtgg

SEQ ID NO: 88 - DNA, 46 bp, synthetic construct
  misc_feature 1..46: note = Synthetic
  misc_feature 24..25: note = n is a, c, g, or t
  source 1..46: mol_type = other DNA
ccacattcttgcacttggccctmnncaccggaacctccgagacttc

SEQ ID NO: 89 - DNA, 44 bp, synthetic construct
  misc_feature 1..44: note = Synthetic
  misc_feature 22..23: note = n is a, c, g, or t
  source 1..44: mol_type = other DNA
gtctcggaggttccggtgtggnnkgccaagtgcaagaatgtggc

SEQ ID NO: 90 - DNA, 44 bp, synthetic construct
  misc_feature 1..44: note = Synthetic
  misc_feature 22..23: note = n is a, c, g, or t
  source 1..44: mol_type = other DNA
gccacattcttgcacttggcmnnccacaccggaacctccgagac

SEQ ID NO: 91 - DNA, 45 bp, synthetic construct
  misc_feature 1..45: note = Synthetic
  misc_feature 21..22: note = n is a, c, g, or t
  source 1..45: mol_type = other DNA
cggaggttccggtgtggaggnnkaagtgcaagaatgtggctgcac

SEQ ID NO: 92 - DNA, 45 bp, synthetic construct
  misc_feature 1..45: note = Synthetic
  misc_feature 24..25: note = n is a, c, g, or t
  source 1..45: mol_type = other DNA
gtgcagccacattcttgcacttmnncctccacaccggaacctccg

SEQ ID NO: 93 - DNA, 45 bp, synthetic construct
  misc_feature 1..45: note = Synthetic
  misc_feature 22..23: note = n is a, c, g, or t
  source 1..45: mol_type = other DNA
gaggttccggtgtggagggccnnktgcaagaatgtggctgcactg

SEQ ID NO: 94 - DNA, 45 bp, synthetic construct
  misc_feature 1..45: note = Synthetic
  misc_feature 23..24: note = n is a, c, g, or t
  source 1..45: mol_type = other DNA
cagtgcagccacattcttgcamnnggccctccacaccggaacctc

SEQ ID NO: 95 - DNA, 46 bp, synthetic construct
  misc_feature 1..46: note = Synthetic
  misc_feature 22..23: note = n is a, c, g, or t
  source 1..46: mol_type = other DNA
gttccggtgtggagggccaagnnkaagaatgtggctgcactgggtc

SEQ ID NO: 96 - DNA, 46 bp, synthetic construct
  misc_feature 1..46: note = Synthetic
  misc_feature 24..25: note = n is a, c, g, or t
  source 1..46: mol_type = other DNA
gacccagtgcagccacattcttmnncttggccctccacaccggaac

SEQ ID NO: 97 - DNA, 43 bp, synthetic construct
  misc_feature 1..43: note = Synthetic
  misc_feature 21..22: note = n is a, c, g, or t
  source 1..43: mol_type = other DNA
cggtgtggagggccaagtgcnnkaatgtggctgcactgggtcg

SEQ ID NO: 98 - DNA, 43 bp, synthetic construct
  misc_feature 1..43: note = Synthetic
  misc_feature 22..23: note = n is a, c, g, or t
  source 1..43: mol_type = other DNA
cgacccagtgcagccacattmnngcacttggccctccacaccg

SEQ ID NO: 99 - DNA, 45 bp, synthetic construct
  misc_feature 1..45: note = Synthetic
  misc_feature 22..23: note = n is a, c, g, or t
  source 1..45: mol_type = other DNA
gtgtggagggccaagtgcaagnnkgtggctgcactgggtcgggag

SEQ ID NO: 100 - DNA, 45 bp, synthetic construct
  misc_feature 1..45: note = Synthetic
  misc_feature 23..24: note = n is a, c, g, or t
  source 1..45: mol_type = other DNA
ctcccgacccagtgcagccacmnncttgcacttggccctccacac

SEQ ID NO: 101 - DNA, 44 bp, synthetic construct
  misc_feature 1..44: note = Synthetic
  misc_feature 21..22: note = n is a, c, g, or t
  source 1..44: mol_type = other DNA
ggagggccaagtgcaagaatnnkgctgcactgggtcgggagatg

SEQ ID NO: 102 - DNA, 44 bp, synthetic construct
  misc_feature 1..44: note = Synthetic
  misc_feature 23..24: note = n is a, c, g, or t
  source 1..44: mol_type = other DNA
catctcccgacccagtgcagcmnnattcttgcacttggccctcc

SEQ ID NO: 103 - DNA, 46 bp, synthetic construct
  misc_feature 1..46: note = Synthetic
  misc_feature 23..24: note = n is a, c, g, or t
  source 1..46: mol_type = other DNA
gagggccaagtgcaagaatgtgnnkgcactgggtcgggagatgagc

SEQ ID NO: 104 - DNA, 46 bp, synthetic construct
  misc_feature 1..46: note = Synthetic
  misc_feature 23..24: note = n is a, c, g, or t
  source 1..46: mol_type = other DNA
gctcatctcccgacccagtgcmnncacattcttgcacttggccctc

SEQ ID NO: 105 - DNA, 43 bp, synthetic construct
  misc_feature 1..43: note = Synthetic
  misc_feature 21..22: note = n is a, c, g, or t
  source 1..43: mol_type = other DNA
cggcgctcaggtacgagtatnnkctaatgcccacggagctcac

SEQ ID NO: 106 - DNA, 43 bp, synthetic construct
  misc_feature 1..43: note = Synthetic
  misc_feature 22..23: note = n is a, c, g, or t
  source 1..43: mol_type = other DNA
gtgagctccgtgggcattagmnnatactcgtacctgagcgccg

SEQ ID NO: 107 - DNA, 43 bp, synthetic construct
  misc_feature 1..43: note = Synthetic
  misc_feature 21..22: note = n is a, c, g, or t
  source 1..43: mol_type = other DNA
cgctcaggtacgagtatcttnnkatgcccacggagctcacaac

SEQ ID NO: 108 - DNA, 43 bp, synthetic construct
  misc_feature 1..43: note = Synthetic
  misc_feature 22..23: note = n is a, c, g, or t
  source 1..43: mol_type = other DNA
gttgtgagctccgtgggcatmnnaagatactcgtacctgagcg

SEQ ID NO: 109 - DNA, 46 bp, synthetic construct
  misc_feature 1..46: note = Synthetic
  misc_feature 23..24: note = n is a, c, g, or t
  source 1..46: mol_type = other DNA
gctcaggtacgagtatcttctannkcccacggagctcacaacatgg

SEQ ID NO: 110 - DNA, 46 bp, synthetic construct
  misc_feature 1..46: note = Synthetic
  misc_feature 23..24: note = n is a, c, g, or t
  source 1..46: mol_type = other DNA
ccatgttgtgagctccgtgggmnntagaagatactcgtacctgagc

SEQ ID NO: 111 - DNA, 43 bp, synthetic construct
  misc_feature 1..43: note = Synthetic
  misc_feature 21..22: note = n is a, c, g, or t
  source 1..43: mol_type = other DNA
ggtacgagtatcttctaatgnnkacggagctcacaacatggcc

SEQ ID NO: 112 - DNA, 43 bp, synthetic construct
  misc_feature 1..43: note = Synthetic
  misc_feature 22..23: note = n is a, c, g, or t
  source 1..43: mol_type = other DNA
ggccatgttgtgagctccgtmnncattagaagatactcgtacc

SEQ ID NO: 113 - DNA, 47 bp, synthetic construct
  misc_feature 1..47: note = Synthetic
  misc_feature 24..25: note = n is a, c, g, or t
  source 1..47: mol_type = other DNA
ggtacgagtatcttctaatgcccnnkgagctcacaacatggccactg

SEQ ID NO: 114 - DNA, 47 bp, synthetic construct
  misc_feature 1..47: note = Synthetic
  misc_feature 23..24: note = n is a, c, g, or t
  source 1..47: mol_type = other DNA
cagtggccatgttgtgagctcmnngggcattagaagatactcgtacc

SEQ ID NO: 115 - DNA, 45 bp, synthetic construct
  misc_feature 1..45: note = Synthetic
  misc_feature 23..24: note = n is a, c, g, or t
  source 1..45: mol_type = other DNA
cgagtatcttctaatgcccacgnnkctcacaacatggccactggg

SEQ ID NO: 116 - DNA, 45 bp, synthetic construct
  misc_feature 1..45: note = Synthetic
  misc_feature 22..23: note = n is a, c, g, or t
  source 1..45: mol_type = other DNA
cccagtggccatgttgtgagmnncgtgggcattagaagatactcg

SEQ ID NO: 117 - DNA, 49 bp, synthetic construct
  misc_feature 1..49: note = Synthetic
  misc_feature 25..26: note = n is a, c, g, or t
  source 1..49: mol_type = other DNA
gagtatcttctaatgcccacggagnnkacaacatggccactgggtatgg

SEQ ID NO: 118 - DNA, 49 bp, synthetic construct
  misc_feature 1..49: note = Synthetic
  misc_feature 24..25: note = n is a, c, g, or t
  source 1..49: mol_type = other DNA
ccatacccagtggccatgttgtmnnctccgtgggcattagaagatactc

SEQ ID NO: 119 - DNA, 47 bp, synthetic construct
  misc_feature 1..47: note = Synthetic
  misc_feature 22..23: note = n is a, c, g, or t
  source 1..47: mol_type = other DNA
cttctaatgcccacggagctcnnkacatggccactgggtatggatac

SEQ ID NO: 120 - DNA, 47 bp, synthetic construct
  misc_feature 1..47: note = Synthetic
  misc_feature 25..26: note = n is a, c, g, or t
  source 1..47: mol_type = other DNA
gtatccatacccagtggccatgtmnngagctccgtgggcattagaag

SEQ ID NO: 121 - DNA, 45 bp, synthetic construct
  misc_feature 1..45: note = Synthetic
  misc_feature 22..23: note = n is a, c, g, or t
  source 1..45: mol_type = other DNA
ctaatgcccacggagctcacannktggccactgggtatggatacc

SEQ ID NO: 122 - DNA, 45 bp, synthetic construct
  misc_feature 1..45: note = Synthetic
  misc_feature 23..24: note = n is a, c, g, or t
  source 1..45: mol_type = other DNA
ggtatccatacccagtggccamnntgtgagctccgtgggcattag

SEQ ID NO: 123 - DNA, 44 bp, synthetic construct
  misc_feature 1..44: note = Synthetic
  misc_feature 20..21: note = n is a, c, g, or t
  source 1..44: mol_type = other DNA
gcccacggagctcacaacannkccactgggtatggataccgtgg

SEQ ID NO: 124 - DNA, 44 bp, synthetic construct
  misc_feature 1..44: note = Synthetic
  misc_feature 24..25: note = n is a, c, g, or t
  source 1..44: mol_type = other DNA
ccacggtatccatacccagtggmnntgttgtgagctccgtgggc

SEQ ID NO: 125 - DNA, 47 bp, synthetic construct
  misc_feature 1..47: note = Synthetic
  misc_feature 21..22: note = n is a, c, g, or t
  source 1..47: mol_type = other DNA
ccactatcttccatgaccgcnnkagagaccaggtgttgccttttcag

SEQ ID NO: 126 - DNA, 47 bp, synthetic construct
  misc_feature 1..47: note = Synthetic
  misc_feature 26..27: note = n is a, c, g, or t
  source 1..47: mol_type = other DNA
ctgaaaaggcaacacctggtctctmnngcggtcatggaagatagtgg

SEQ ID NO: 127 - DNA, 45 bp, synthetic construct
  misc_feature 1..45: note = Synthetic
  misc_feature 21..22: note = n is a, c, g, or t
  source 1..45: mol_type = other DNA
ctatcttccatgaccgcagannkgaccaggtgttgccttttcagg

SEQ ID NO: 128 - DNA, 45 bp, synthetic construct
  misc_feature 1..45: note = Synthetic
  misc_feature 24..25: note = n is a, c, g, or t
  source 1..45: mol_type = other DNA
cctgaaaaggcaacacctggtcmnntctgcggtcatggaagatag

SEQ ID NO: 129 - DNA, 46 bp, synthetic construct
  misc_feature 1..46: note = Synthetic
  misc_feature 24..25: note = n is a, c, g, or t
  source 1..46: mol_type = other DNA
ctatcttccatgaccgcagaagannkcaggtgttgccttttcaggc

SEQ ID NO: 130 - DNA, 46 bp, synthetic construct
  misc_feature 1..46: note = Synthetic
  misc_feature 22..23: note = n is a, c, g, or t
  source 1..46: mol_type = other DNA
gcctgaaaaggcaacacctgmnntcttctgcggtcatggaagatag

SEQ ID NO: 131 - DNA, 45 bp, synthetic construct
  misc_feature 1..45: note = Synthetic
  misc_feature 23..24: note = n is a, c, g, or t
  source 1..45: mol_type = other DNA
cttccatgaccgcagaagagacnnkgtgttgccttttcaggccgc

SEQ ID NO: 132 - DNA, 45 bp, synthetic construct
  misc_feature 1..45: note = Synthetic
  misc_feature 22..23: note = n is a, c, g, or t
  source 1..45: mol_type = other DNA
gcggcctgaaaaggcaacacmnngtctcttctgcggtcatggaag

SEQ ID NO: 133 - DNA, 44 bp, synthetic construct
  misc_feature 1..44: note = Synthetic
  misc_feature 22..23: note = n is a, c, g, or t
  source 1..44: mol_type = other DNA
catgaccgcagaagagaccagnnkttgccttttcaggccgctgc

SEQ ID NO: 134 - DNA, 44 bp, synthetic construct
  misc_feature 1..44: note = Synthetic
  misc_feature 22..23: note = n is a, c, g, or t
  source 1..44: mol_type = other DNA
gcagcggcctgaaaaggcaamnnctggtctcttctgcggtcatg

SEQ ID NO: 135 - DNA, 44 bp, synthetic construct
  misc_feature 1..44: note = Synthetic
  misc_feature 22..23: note = n is a, c, g, or t
  source 1..44: mol_type = other DNA
gaccgcagaagagaccaggtgnnkccttttcaggccgctgctcc

SEQ ID NO: 136 - DNA, 44 bp, synthetic construct
  misc_feature 1..44: note = Synthetic
  misc_feature 22..23: note = n is a, c, g, or t
  source 1..44: mol_type = other DNA
ggagcagcggcctgaaaaggmnncacctggtctcttctgcggtc

SEQ ID NO: 137 - DNA, 44 bp, synthetic construct
  misc_feature 1..44: note = Synthetic
  misc_feature 21..22: note = n is a, c, g, or t
  source 1..44: mol_type = other DNA
gcagaagagaccaggtgttgnnktttcaggccgctgctccgctc

SEQ ID NO: 138 - DNA, 44 bp, synthetic construct
  misc_feature 1..44: note = Synthetic
  misc_feature 23..24: note = n is a, c, g, or t
  source 1..44: mol_type = other DNA
gagcggagcagcggcctgaaamnncaacacctggtctcttctgc

SEQ ID NO: 139 - DNA, 44 bp, synthetic construct
  misc_feature 1..44: note = Synthetic
  misc_feature 21..22: note = n is a, c, g, or t
  source 1..44: mol_type = other DNA
gaagagaccaggtgttgcctnnkcaggccgctgctccgctcaac

SEQ ID NO: 140 - DNA, 44 bp, synthetic construct
  misc_feature 1..44: note = Synthetic
  misc_feature 23..24: note = n is a, c, g, or t
  source 1..44: mol_type = other DNA
gttgagcggagcagcggcctgmnnaggcaacacctggtctcttc

SEQ ID NO: 141 - DNA, 44 bp, synthetic construct
  misc_feature 1..44: note = Synthetic
  misc_feature 21..22: note = n is a, c, g, or t
  source 1..44: mol_type = other DNA
gagaccaggtgttgccttttnnkgccgctgctccgctcaactac

SEQ ID NO: 142 - DNA, 44 bp, synthetic construct
  misc_feature 1..44: note = Synthetic
  misc_feature 23..24: note = n is a, c, g, or t
  source 1..44: mol_type = other DNA
gtagttgagcggagcagcggcmnnaaaaggcaacacctggtctc

SEQ ID NO: 143 - DNA, 43 bp, synthetic construct
  misc_feature 1..43: note = Synthetic
  misc_feature 22..23: note = n is a, c, g, or t
  source 1..43: mol_type = other DNA
gaccaggtgttgccttttcagnnkgctgctccgctcaactacc

SEQ ID NO: 144 - DNA, 43 bp, synthetic construct
  misc_feature 1..43: note = Synthetic
  misc_feature 21..22: note = n is a, c, g, or t
  source 1..43: mol_type = other DNA
ggtagttgagcggagcagcmnnctgaaaaggcaacacctggtc

SEQ ID NO: 145 - DNA, 47 bp, synthetic construct
  misc_feature 1..47: note = Synthetic
  misc_feature 23..24: note = n is a, c, g, or t
  source 1..47: mol_type = other DNA
ccaggtgttgccttttcaggccnnkgctccgctcaactaccattacg

SEQ ID NO: 146 - DNA, 47 bp, synthetic construct
  misc_feature 1..47: note = Synthetic
  misc_feature 24..25: note = n is a, c, g, or t
  source 1..47: mol_type = other DNA
cgtaatggtagttgagcggagcmnnggcctgaaaaggcaacacctgg

SEQ ID NO: 147 - DNA, 45 bp, synthetic construct
  misc_feature 1..45: note = Synthetic
  misc_feature 22..23: note = n is a, c, g, or t
  source 1..45: mol_type = other DNA
gtgttgccttttcaggccgctnnkccgctcaactaccattacgcg

SEQ ID NO: 148 - DNA, 45 bp, synthetic construct
  misc_feature 1..45: note = Synthetic
  misc_feature 23..24: note = n is a, c, g, or t
  source 1..45: mol_type = other DNA
cgcgtaatggtagttgagcggmnnagcggcctgaaaaggcaacac

SEQ ID NO: 149 - DNA, 46 bp, synthetic construct
  misc_feature 1..46: note = Synthetic
  misc_feature 23..24: note = n is a, c, g, or t
  source 1..46: mol_type = other DNA
gttgccttttcaggccgctgctnnkctcaactaccattacgcgtac

SEQ ID NO: 150 - DNA, 46 bp, synthetic construct
  misc_feature 1..46: note = Synthetic
  misc_feature 23..24: note = n is a, c, g, or t
  source 1..46: mol_type = other DNA
gtacgcgtaatggtagttgagmnnagcagcggcctgaaaaggcaac

SEQ ID NO: 151 - DNA, 44 bp, synthetic construct
  misc_feature 1..44: note = Synthetic
  misc_feature 22..23: note = n is a, c, g, or t
  source 1..44: mol_type = other DNA
ccttttcaggccgctgctccgnnkaactaccattacgcgtaccg

SEQ ID NO: 152 - DNA, 44 bp, synthetic construct
  misc_feature 1..44: note = Synthetic
  misc_feature 22..23: note = n is a, c, g, or t
  source 1..44: mol_type = other DNA
cggtacgcgtaatggtagttmnncggagcagcggcctgaaaagg

SEQ ID NO: 153 - DNA, 42 bp, synthetic construct
  misc_feature 1..42: note = Synthetic
  misc_feature 19..20: note = n is a, c, g, or t
  source 1..42: mol_type = other DNA
caggccgctgctccgctcnnktaccattacgcgtaccgcctc

SEQ ID NO: 154 - DNA, 42 bp, synthetic construct
  misc_feature 1..42: note = Synthetic
  misc_feature 23..24: note = n is a, c, g, or t
  source 1..42: mol_type = other DNA
gaggcggtacgcgtaatggtamnngagcggagcagcggcctg

SEQ ID NO: 155 - DNA, 45 bp, synthetic construct
  misc_feature 1..45: note = Synthetic
  misc_feature 22..23: note = n is a, c, g, or t
  source 1..45: mol_type = other DNA
caggccgctgctccgctcaacnnkcattacgcgtaccgcctcgac

SEQ ID NO: 156 - DNA, 45 bp, synthetic construct
  misc_feature 1..45: note = Synthetic
  misc_feature 23..24: note = n is a, c, g, or t
  source 1..45: mol_type = other DNA
gtcgaggcggtacgcgtaatgmnngttgagcggagcagcggcctg

SEQ ID NO: 157 - DNA, 78 bp, synthetic construct
  misc_feature 1..78: note = Synthetic
  source 1..78: mol_type = other DNA
ctcgagggagccgagaaagtgadgcrsytctatrtcttkdscgacrtcvtcgwgvtcccagtcgtggaatggcggtgg

SEQ ID NO: 158 - DNA, 78 bp, synthetic construct
  misc_feature 1..78: note = Synthetic
  source 1..78: mol_type = other DNA
ctcgagggagccgagaaagtgadgcrsytcvtcrtcttkdscgacrtcvtcgwgvtcccagtcgtggaatggcggtgg

SEQ ID NO: 159 - DNA, 78 bp, synthetic construct
  misc_feature 1..78: note = Synthetic
  source 1..78: mol_type = other DNA
ccaccgccattccacgactgggabcwcgabgaygtcgshmaagayatagarsygchtcactttctcggctccctcgag

SEQ ID NO: 160 - DNA, 78 bp, synthetic construct
  misc_feature 1..78: note = Synthetic
  source 1..78: mol_type = other DNA
ccaccgccattccacgactgggabcwcgabgaygtcgshmaagaygabgarsygchtcactttctcggctccctcgag

SEQ ID NO: 161 - DNA, 84 bp, synthetic construct
  misc_feature 1..84: note = Synthetic
  source 1..84: mol_type = other DNA
cggccaccgccattccacgactggtagcwcgabaaygtcgshaaaaayatacaasygchtcactttctcggctccctcgagctg

SEQ ID NO: 162 - DNA, 51 bp, synthetic construct
  misc_feature 1..51: note = Synthetic
  source 1..51: mol_type = other DNA
aatctctcatctaagaggctggatcctaggatggctctcgtggattacggc

SEQ ID NO: 163 - DNA, 52 bp, synthetic construct
  misc_feature 1..52: note = Synthetic
  source 1..52: mol_type = other DNA
tggccaatccagaagatggacaagtctagactactcttcgtcgtgccgccag

SEQ ID NO: 164 - DNA, 27 bp, synthetic construct
  misc_feature 1..27: note = Synthetic
  source 1..27: mol_type = other DNA
ctaccagtcgtggaatggcggtggccg

SEQ ID NO: 165 - DNA, 63 bp, synthetic construct
  misc_feature 1..63: note = Synthetic
  source 1..63: mol_type = other DNA
gtctcggaggttccggtgtggabsgbcmrgtgcaaswscgtggctgcactgggtcgggagatg

SEQ ID NO: 166 - DNA, 63 bp, synthetic construct
  misc_feature 1..63: note = Synthetic
  source 1..63: mol_type = other DNA
gtctcggaggttccggtgtggcwsgbcmrgtgcaaswscgtggctgcactgggtcgggagatg

SEQ ID NO: 167 - DNA, 63 bp, synthetic construct
  misc_feature 1..63: note = Synthetic
  source 1..63: mol_type = other DNA
gtctcggaggttccggtgtggabsgbcmrgtgcaasmatgtggctgcactgggtcgggagatg

SEQ ID NO: 168 - DNA, 63 bp, synthetic construct
  misc_feature 1..63: note = Synthetic
  source 1..63: mol_type = other DNA
gtctcggaggttccggtgtggcwsgbcmrgtgcaasmatgtggctgcactgggtcgggagatg

SEQ ID NO: 169 - DNA, 51 bp, synthetic construct; identical to SEQ ID NO: 162
  misc_feature 1..51: note = Synthetic
  source 1..51: mol_type = other DNA

SEQ ID NO: 170 - DNA, 52 bp, synthetic construct; identical to SEQ ID NO: 163
  misc_feature 1..52: note = Synthetic
  source 1..52: mol_type = other DNA

SEQ ID NO: 171 - DNA, 25 bp, synthetic construct
  misc_feature 1..25: note = Synthetic
  source 1..25: mol_type = other DNA
caccggaacctccgagacttccgtt

SEQ ID NO: 172 - DNA, 2601 bp, synthetic construct
  misc_feature 1..2601: note = Synthetic
  source 1..2601: mol_type = other DNA
atggctctcgtggattacggcaagcttttcgaggatctgaaccagataagcatgggtgtactggatcgggtagagttttcagaggtgatggtgatccacaggatgtatgtgaggctagctgatctgaatgtggggcagctcgagggagccgagaaagtgaagcacttgtatattttttgcgacgttatcgagctaccagtcgtggaatggcggtggccgccgcaaataccaggatcggtgacggtgatcatattgtgtcgtcttcttcaatggccaactgatgggaggcagtcggacaccgagctccacctgacattcatgaagttgcatgccatacaacgagaggaaaatcggtgggagataaccgcagcagatggcatgaactggggagtttacatacacgcagaggaagtacaggttggcgtgctgacaatgtcatggtcttcggtacttagagtttcggcacttcgctctgttataacctccggctttcgcgccgttagtgtgtttgaggtaccgggaagtgtaaggtccacccttggagctactttaaggcccgatcacgccttatatagtacaactatgcaagccacacccaacgcatcgcatattagtgcttttaaccttcgcatagtttccccgtcggcatatcgtgtttgtcctctccaaaatgacacagatacctacttaggtattccagcagacgtggcggcagttcttccagtagacgtggtgactgatcctaacatcttgctgggcatgcagacaacggtacacattgcggagctagtcaaggcatgtcatccgtcacccgatgttgtgagcgctgtaggggagcacctgaactggctcaacaaactcttactcccacttaaggaatcgactcagttgcaaggaagcgagtcgtacaaggagtgccttgcactcttgggtcgtgttcacgctgcgatgaagatggtgagaattggcttagtagtgccccagctgcaatacagaatgtacggtagcctcatcaaccaaatggcccaagtagcacaaaactacgaccgagaattcaagcaattcaaattattcatcatccaaaatcaaatccttggcagctatttgctgcagcagaacagggcatttgctgagagggagctgcagatggagagctttcatgctgctgtcatttctcaaagaagggaggagttggacaatacattcgcaaagatggaccgattgagcgggcaaatggaggcagagagtagtgcaatggagcaagccaaaaaggaaatggacgaaggattgaggcagttccagaataggcaagttgcgaacgccctctttgccgttcttagcgctgtagctcagattgggcttgcattccttacggctggtgcaacggctcctggagctgtggcgtcggcggggcaagctgtgagcatagcaggtcaggcggcgcaaggtctgcgaagggtggtggaaattctagagcagctggaggctgtgatggaggttgtggctgctgtgaaggacctcgtggattcattggaacaggtaggtcagattgtggacgcaccggtgatgccggaattgccctcagaggcggactggtccatttttgtgaacgaggtggaggccgtggcagagggcatgccaacggaagtctcggaggttccggtgtggagggccaagtgcaagaatgtggctgcactgggtcgggagatgagcatcacggcagtacagatgtcggagctgcagtatgacatctgggtgcaaggcatgatgcgggatatggctcgaagccaggcagacaggctggccgcaattcaacccgcggaccttaccaactatttggagatggctacccagatggatatgcggactacgaggatgctgctggggctcctcaacatattgcgcatccagaatgcggcgctcaggtacgagtatcttctaatgcccacggagctcacaacatggccactgggtatggataccgtgggtgacttgctcatcgcgcaggagaatgctgcactgataggattaatgcagctagggccctcatctgatttcacgagcaggcatgtggtgaaagacatacctgtgaacttgctgctcgatggcgaggattgggagtttgagattcctgtgcaagctggcatgtccagcttcccttccagctggtctcgcgtccgtattcggcacctggagatgcactttgtgaaggaggccagcggtattggtggtgagattatccaccagcctaccacccagactgggaccgtttacatccttctgcagggttccactatcttccatgaccgcagaagagaccaggtgttgccttttcaggccgctgctccgctcaactaccattacgcgtaccgcctcgacaccggcgactccactctcacaaacgaaccctctgaacagtttgccaacaagttcatgcagatgacacccttcacccgttggaggcttcgtctgtctgcgtccgcaaaagagaatgcaggattagcctttcccacggctacagcacttgactccactacccagattgtcatcactttccatgttacggccatcagacaaattgactggcggcacgacgaagag

SEQ ID NO: 173 - DNA, 2601 bp, synthetic construct
  misc_feature 1..2601: note = Synthetic
  source 1..2601: mol_type = other DNA
atggctctcgtggattacggcaagcttttcgaggatctgaaccagataagcatgggtgtactggatcgggtagagttttcagaggtgatggtgatccacaggatgtatgtgaggctagctgatctgaatgtggggcagctcgagggagccgagaaagtgaagcacttgtatattttttgcgacgttgtcgagctaccagtcgtggaatggcggtggccgccgcaaataccaggatcggtgacggtgatcatattgtgtcgtcttcttcaatggccaactgatgggaggcagtcggacaccgagctccacctgacattcatgaagttgcatgccatacaacgagaggaaaatcggtgggagataaccgcagcagatggcatgaactggggagtttacatacacgcagaggaagtacaggttggcgtgctgacaatgtcatggtcttcggtacttagagtttcggcacttcgctctgttataacctccggctttcgcgccgttagtgtgtttgaggtaccgggaagtgtaaggtccacccttggagctactttaaggcccgatcacgccttatatagtacaactatgcaagccacacccaacgcatcgcatattagtgcttttaaccttcgcatagtttccccgtcggcatatcgtgtttgtcctctccaaaatgacacagatacctacttaggtattccagcagacgtggcggcagttcttccagtagacgtggtgactgatcctaacatcttgctgggcatgcagacaacggtacacattgcggagctagtcaaggcatgtcatccgtcacccgatgttgtgagcgctgtaggggagcacctgaactggctcaacaaactcttactcccacttaaggaatcgactcagttgcaaggaagcgagtcgtacaaggagtgccttgcactcttgggtcgtgttcacgctgcgatgaagatggtgagaattggcttagtagtgccccagctgcaatacagaatgtacggtagcctcatcaaccaaatggcccaagtagcacaaaactacgaccgagaattcaagcaattcaaattattcatcatccaaaatcaaatccttggcagctatttgctgcagcagaacagggcatttgctgagagggagctgcagatggagagctttcatgctgctgtcatttctcaaagaagggaggagttggacaatacattcgcaaagatggaccgattgagcgggcaaatggaggcagagagtagtgcaatggagcaagccaaaaaggaaatggacgaaggattgaggcagttccagaataggcaagttgcgaacgccctctttgccgttcttagcgctgtagctcagattgggcttgcattccttacggctggtgcaacggctcctggagctgtggcgtcggcggggcaagctgtgagcatagcaggtcaggcggcgcaaggtctgcgaagggtggtggaaattctagagcagctggaggctgtgatggaggttgtggctgctgtgaaggacctcgtggattcattggaacaggtaggtcagattgtggacgcaccggtgatgccggaattgccctcagaggcggactggtccatttttgtgaacgaggtggaggccgtggcagagggcatgccaacggaagtctcggaggttccggtgtggagggccaagtgcaagaatgtggctgcactgggtcgggagatgagcatcacggcagtacagatgtcggagctgcagtatgacatctgggtgcaaggcatgatgcgggatatggctcgaagccaggcagacaggctggccgcaattcaacccgcggaccttaccaactatttggagatggctacccagatggatatgcggactacgaggatgctgctggggctcctcaacatattgcgcatccagaatgcggcgctcaggtacgagtatcttctaatgcccacggagctcacaacatggccactgggtatggataccgtgggtgacttgctcatcgcgcaggagaatgctgcactgataggattaatgcagctagggccctcatctgatttcacgagcaggcatgtggtgaaagacatacctgtgaacttgctgctcgatggcgaggattgggagtttgagattcctgtgcaagctggcatgtccagcttcccttccagctggtctcgcgtccgtattcggcacctggagatgcactttgtgaaggaggccagcggtattggtggtgagattatccaccagcctaccacccagactgggaccgtttacatccttctgcagggttccactatcttccatgaccgcagaagagaccaggtgttgccttttcaggccgctgctccgctcaactaccattacgcgtaccgcctcgacaccggcgactccactctcacaaacgaaccctctgaacagtttgccaacaagttcatgcagatgacacccttcacccgttggaggcttcgtctgtctgcgtccgcaaaagagaatgcaggattagcctttcccacggctacagcacttgactccactacccagattgtcatcactttccatgttacggccatcagacaaattgactggcggcacgacgaagag

SEQ ID NO: 174 - DNA, 2601 bp, synthetic construct
  misc_feature 1..2601: note = Synthetic
  source 1..2601: mol_type = other DNA
atggctctcgtggattacggcaagcttttcgaggatctgaaccagataagcatgggtgtactggatcgggtagagttttcagaggtgatggtgatccacaggatgtatgtgaggctagctgatctgaatgtggggcagctcgagggagccgagaaagtgaagcacttgtatatttttagcgacattatcgagctaccagtcgtggaatggcggtggccgccgcaaataccaggatcggtgacggtgatcatattgtgtcgtcttcttcaatggccaactgatgggaggcagtcggacaccgagctccacctgacattcatgaagttgcatgccatacaacgagaggaaaatcggtgggagataaccgcagcagatggcatgaactggggagtttacatacacgcagaggaagtacaggttggcgtgctgacaatgtcatggtcttcggtacttagagtttcggcacttcgctctgttataacctccggctttcgcgccgttagtgtgtttgaggtaccgggaagtgtaaggtccacccttggagctactttaaggcccgatcacgccttatatagtacaactatgcaagccacacccaacgcatcgcatattagtgcttttaaccttcgcatagtttccccgtcggcatatcgtgtttgtcctctccaaaatgacacagatacctacttaggtattccagcagacgtggcggcagttcttccagtagacgtggtgactgatcctaacatcttgctgggcatgcagacaacggtacacattgcggagctagtcaaggcatgtcatccgtcacccgatgttgtgagcgctgtaggggagcacctgaactggctcaacaaactcttactcccacttaaggaatcgactcagttgcaaggaagcgagtcgtacaaggagtgccttgcactcttgggtcgtgttcacgctgcgatgaagatggtgagaattggcttagtagtgccccagctgcaatacagaatgtacggtagcctcatcaaccaaatggcccaagtagcacaaaactacgaccgagaattcaagcaattcaaattattcatcatccaaaatcaaatccttggcagctatttgctgcagcagaacagggcatttgctgagagggagctgcagatggagagctttcatgctgctgtcatttctcaaagaagggaggagttggacaatacattcgcaaagatggaccgattgagcgggcaaatggaggcagagagtagtgcaatggagcaagccaaaaaggaaatggacgaaggattgaggcagttccagaataggcaagttgcgaacgccctctttgccgttcttagcgctgtagctcagattgggcttgcattccttacggctggtgcaacggctcctggagctgtggcgtcggcggggcaagctgtgagcatagcaggtcaggcggcgcaaggtctgcgaagggtggtggaaattctagagcagctggaggctgtgatggaggttgtggctgctgtgaaggacctcgtggattcattggaacaggtaggtcagattgtggacgcaccggtgatgccggaattgccctcagaggcggactggtccatttttgtgaacgaggtggaggccgtggcagagggcatgccaacggaagtctcggaggttccggtgtggagggccaagtgcaagaatgtggctgcactgggtcgggagatgagcatcacggcagtacagatgtcggagctgcagtatgacatctgggtgcaaggcatgatgcgggatatggctcgaagccaggcagacaggctggccgcaattcaacccgcggaccttaccaactatttggagatggctacccagatggatatgcggactacgaggatgctgctggggctcctcaacatattgcgcatccagaatgcggcgctcaggtacgagtatcttctaatgcccacggagctcacaacatggccactgggtatggataccgtgggtgacttgctcatcgcgcaggagaatgctgcactgataggattaatgcagctagggccctcatctgatttcacgagcaggcatgtggtgaaagacatacctgtgaacttgctgctcgatggcgaggattgggagtttgagattcctgtgcaagctggcatgtccagcttcccttccagctggtctcgcgtccgtattcggcacctggagatgcactttgtgaaggaggccagcggtattggtggtgagattatccaccagcctaccacccagactgggaccgtttacatccttctgcagggttccactatcttccatgaccgcagaagagaccaggtgttgccttttcaggccgctgctccgctcaactaccattacgcgtaccgcctcgacaccggcgactccactctcacaaacgaaccctctgaacagtttgccaacaagttcatgcagatgacacccttcacccgttggaggcttcgtctgtctgcgtccgcaaaagagaatgcaggattagcctttcccacggctacagcacttgactccactacccagattgtcatcactttccatgttacggccatcagacaaattgactggcggcacgacgaagag

SEQ ID NO: 175 - DNA, 2601 bp, synthetic construct
  misc_feature 1..2601: note = Synthetic
  source 1..2601: mol_type = other DNA
atggctctcgtggattacggcaagcttttcgaggatctgaaccagataagcatgggtgtactggatcgggtagagttttcagaggtgatggtgatccacaggatgtatgtgaggctagctgatctgaatgtggggcagctcgagggagccgagaaagtgaagcacttgtatatttttaccgacgttctcgagctaccagtcgtggaatggcggtggccgccgcaaataccaggatcggtgacggtgatcatattgtgtcgtcttcttcaatggccaactgatgggaggcagtcggacaccgagctccacctgacattcatgaagttgcatgccatacaacgagaggaaaatcggtgggagataaccgcagcagatggcatgaactggggagtttacatacacgcagaggaagtacaggttggcgtgctgacaatgtcatggtcttcggtacttagagtttcggcacttcgctctgttataacctccggctttcgcgccgttagtgtgtttgaggtaccgggaagtgtaaggtccacccttggagctactttaaggcccgatcacgccttatatagtacaactatgcaagccacacccaacgcatcgcatattagtgcttttaaccttcgcatagtttccccgtcggcatatcgtgtttgtcctctccaaaatgacacagatacctacttaggtattccagcagacgtggcggcagttcttccagtagacgtggtgactgatcctaacatcttgctgggcatgcagacaacggtacacattgcggagctagtcaaggcatgtcatccgtcacccgatgttgtgagcgctgtaggggagcacctgaactggctcaacaaactcttactcccacttaaggaatcgactcagttgcaaggaagcgagtcgtacaaggagtgccttgcactcttgggtcgtgttcacgctgcgatgaagatggtgagaattggcttagtagtgccccagctgcaatacagaatgtacggtagcctcatcaaccaaatggcccaagtagcacaaaactacgaccgagaattcaagcaattcaaattattcatcatccaaaatcaaatccttggcagctatttgctgcagcagaacagggcatttgctgagagggagctgcagatggagagctttcatgctgctgtcatttctcaaagaagggaggagttggacaatacattcgcaaagatggaccgattgagcgggcaaatggaggcagagagtagtgcaatggagcaagccaaaaaggaaatggacgaaggattgaggcagttccagaataggcaagttgcgaacgccctctttgccgttcttagcgctgtagctcagattgggcttgcattccttacggctggtgcaacggctcctggagctgtggcgtcggcggggcaagctgtgagcatagcaggtcaggcggcgcaaggtctgcgaagggtggtggaaattctagagcagctggaggctgtgatggaggttgtggctgctgtgaaggacctcgtggattcattggaacaggtaggtcagattgtggacgcaccggtgatgccggaattgccctcagaggcggactggtccatttttgtgaacgaggtggaggccgtggcagagggcatgccaacggaagtctcggaggttccggtgtggagggccaagtgcaagaatgtggctgcactgggtcgggagatgagcatcacggcagtacagatgtcggagctgcagtatgacatctgggtgcaaggcatgatgcgggatatggctcgaagccaggcagacaggctggccgcaattcaacccgcggaccttaccaactatttggagatggctacccagatggatatgcggactacgaggatgctgctggggctcctcaacatattgcgcatccagaatgcggcgctcaggtacgagtatcttctaatgcccacggagctcacaacatggccactgggtatggataccgtgggtgacttgctcatcgcgcaggagaatgctgcactgataggattaatgcagctagggccctcatctgatttcacgagcaggcatgtggtgaaagacatacctgtgaacttgctgctcgatggcgaggattgggagtttgagattcctgtgcaagctggcatgtccagcttcccttccagctggtctcgcgtccgtattcggcacctggagatgcactttgtgaaggaggccagcggtattggtggtgagattatccaccagcctaccacccagactgggaccgtttacatccttctgcagggttccactatcttccatgaccgcagaagagaccaggtgttgccttttcaggccgctgctccgctcaactaccattacgcgtaccgcctcgacaccggcgactccactctcacaaacgaaccctctgaacagtttgccaacaagttcatgcagatgacacccttcacccgttggaggcttcgtctgtctgcgtccgcaaaagagaatgcaggattagcctttcccacggctacagcacttgactccactacccagattgtcatcactttccatgttacggccatcagacaaattgactggcggcacgacgaagag

SEQ ID NO: 176 - DNA, 2601 bp, synthetic construct
  misc_feature 1..2601: note = Synthetic
  source 1..2601: mol_type = other DNA
atggctctcgtggattacggcaagcttttcgaggatctgaaccagataagcatgggtgtactggatcgggtagagttttcagaggtgatggtgatccacaggatgtatgtgaggctagctgatctgaatgtggggcagctcgagggagccgagaaagtgaagcacttgtatgtttttgccgacattatcgtgctaccagtcgtggaatggcggtggccgccgcaaataccaggatcggtgacggtgatcatattgtgtcgtcttcttcaatggccaactgatgggaggcagtcggacaccgagctccacctgacattcatgaagttgcatgccatacaacgagaggaaaatcggtgggagataaccgcagcagatggcatgaactggggagtttacatacacgcagaggaagtacaggttggcgtgctgacaatgtcatggtcttcggtacttagagtttcggcacttcgctctgttataacctccggctttcgcgccgttagtgtgtttgaggtaccgggaagtgtaaggtccacccttggagctactttaaggcccgatcacgccttatatagtacaactatgcaagccacacccaacgcatcgcatattagtgcttttaaccttcgcatagtttccccgtcggcatatcgtgtttgtcctctccaaaatgacacagatacctacttaggtattccagcagacgtggcggcagttcttccagtagacgtggtgactgatcctaacatcttgctgggcatgcagacaacggtacacattgcggagctagtcaaggcatgtcatccgtcacccgatgttgtgagcgctgtaggggagcacctgaactggctcaacaaactcttactcccacttaaggaatcgactcagttgcaaggaagcgagtcgtacaaggagtgccttgcactcttgggtcgtgttcacgctgcgatgaagatggtgagaattggcttagtagtgccccagctgcaatacagaatgtacggtagcctcatcaaccaaatggcccaagtagcacaaaactacgaccgagaattcaagcaattcaaattattcatcatccaaaatcaaatccttggcagctatttgctgcagcagaacagggcatttgctgagagggagctgcagatggagagctttcatgctgctgtcatttctcaaagaagggaggagttggacaatacattcgcaaagatggaccgattgagcgggcaaatggaggcagagagtagtgcaatggagcaagccaaaaaggaaatggacgaaggattgaggcagttccagaataggcaagttgcgaacgccctctttgccgttcttagcgctgtagctcagattgggcttgcattccttacggctggtgcaacggctcctggagctgtggcgtcggcggggcaagctgtgagcatagcaggtcaggcggcgcaaggtctgcgaagggtggtggaaattctagagcagctggaggctgtgatggaggttgtggctgctgtgaaggacctcgtggattcattggaacaggtaggtcagattgtggacgcaccggtgatgccggaattgccctcagaggcggactggtccatttttgtgaacgaggtggaggccgtggcagagggcatgccaacggaagtctcggaggttccggtgtggagggccaagtgcaagaatgtggctgcactgggtcgggagatgagcatcacggcagtacagatgtcggagctgcagtatgacatctgggtgcaaggcatgatgcgggatatggctcgaagccaggcagacaggctggccgcaattcaacccgcggaccttaccaactatttggagatggctacccagatggatatgcggactacgaggatgctgctggggctcctcaacatattgcgcatccagaatgcggcgctcaggtacgagtatcttctaatgcccacggagctcacaacatggccactgggtatggataccgtgggtgacttgctcatcgcgcaggagaatgctgcactgataggattaatgcagctagggccctcatctgatttcacgagcaggcatgtggtgaaagacatacctgtgaacttgctgctcgatggcgaggattgggagtttgagattcctgtgcaagctggcatgtccagcttcccttccagctggtctcgcgtccgtattcggcacctggagatgcactttgtgaaggaggccagcggtattggtggtgagattatccaccagcctaccacccagactgggaccgtttacatccttctgcagggttccactatcttccatgaccgcagaagagaccaggtgttgccttttcaggccgctgctccgctcaactaccattacgcgtaccgcctcgacaccggcgactccactctcacaaacgaaccctctgaacagtttgccaacaagttcatgcagatgacacccttcacccgttggaggcttcgtctgtctgcgtccgcaaaagagaatgcaggattagcctttcccacggctacagcacttgactccactacccagattgtcatcactttccatgttacggccatcagacaaattgactggcggcacgacgaagag

SEQ ID NO: 177 - DNA, 2601 bp, synthetic construct
  misc_feature 1..2601: note = Synthetic
  source 1..2601: mol_type = other DNA
atggctctcgtggattacggcaagcttttcgaggatctgaaccagataagcatgggtgtactggatcgggtagagttttcagaggtgatggtgatccacaggatgtatgtgaggctagctgatctgaatgtggggcagctcgagggagccgagaaagtgaagcacttgtatgtttttgccgacgttatcgagctaccagtcgtggaatggcggtggccgccgcaaataccaggatcggtgacggtgatcatattgtgtcgtcttcttcaatggccaactgatgggaggcagtcggacaccgagctccacctgacattcatgaagttgcatgccatacaacgagaggaaaatcggtgggagataaccgcagcagatggcatgaactggggagtttacatacacgcagaggaagtacaggttggcgtgctgacaatgtcatggtcttcggtacttagagtttcggcacttcgctctgttataacctccggctttcgcgccgttagtgtgtttgaggtaccgggaagtgtaaggtccacccttggagctactttaaggcccgatcacgccttatatagtacaactatgcaagccacacccaacgcatcgcatattagtgcttttaaccttcgcatagtttccccgtcggcatatcgtgtttgtcctctccaaaatgacacagatacctacttaggtattccagcagacgtggcggcagttcttccagtagacgtggtgactgatcctaacatcttgctgggcatgcagacaacggtacacattgcggagctagtcaaggcatgtcatccgtcacccgatgttgtgagcgctgtaggggagcacctgaactggctcaacaaactcttactcccacttaaggaatcgactcagttgcaaggaagcgagtcgtacaaggagtgccttgcactcttgggtcgtgttcacgctgcgatgaagatggtgagaattggcttagtagtgccccagctgcaatacagaatgtacggtagcctcatcaaccaaatggcccaagtagcacaaaactacgaccgagaattcaagcaattcaaattattcatcatccaaaatcaaatccttggcagctatttgctgcagcagaacagggcatttgctgagagggagctgcagatggagagctttcatgctgctgtcatttctcaaagaagggaggagttggacaatacattcgcaaagatggaccgattgagcgggcaaatggaggcagagagtagtgcaatggagcaagccaaaaaggaaatggacgaaggattgaggcagttccagaataggcaagttgcgaacgccctctttgccgttcttagcgctgtagctcagattgggcttgcattccttacggctggtgcaacggctcctggagctgtggcgtcggcggggcaagctgtgagcatagcaggtcaggcggcgcaaggtctgcgaagggtggtggaaattctagagcagctggaggctgtgatggaggttgtggctgctgtgaaggacctcgtggattcattggaacaggtaggtcagattgtggacgcaccggtgatgccggaattgccctcagaggcggactggtccatttttgtgaacgaggtggaggccgtggcagagggcatgccaacggaagtctcggaggttccggtgtggagggccaagtgcaagaatgtggctgcactgggtcgggagatgagcatcacggcagtacagatgtcggagctgcagtatgacatctgggtgcaaggcatgatgcgggatatggctcgaagccaggcagacaggctggccgcaattcaacccgcggaccttaccaactatttggagatggctacccagatggatatgcggactacgaggatgctgctggggctcctcaacatattgcgcatccagaatgcggcgctcaggtacgagtatcttctaatgcccacggagctcacaacatggccactgggtatggataccgtgggtgacttgctcatcgcgcaggagaatgctgcactgataggattaatgcagctagggccctcatctgatttcacgagcaggcatgtggtgaaagacatacctgtgaacttgctgctcgatggcgaggattgggagtttgagattcctgtgcaagctggcatgtccagcttcccttccagctggtctcgcgtccgtattcggcacctggagatgcactttgtgaaggaggccagcggtattggtggtgagattatccaccagcctaccacccagactgggaccgtttacatccttctgcagggttccactatcttccatgaccgcagaagagaccaggtgttgccttttcaggccgctgctccgctcaactaccattacgcgtaccgcctcgacaccggcgactccactctcacaaacgaaccctctgaacagtttgccaacaagttcatgcagatgacacccttcacccgttggaggcttcgtctgtctgcgtccgcaaaagagaatgcaggattagcctttcccacggctacagcacttgactccactacccagattgtcatcactttccatgttacggccatcagacaaattgactggcggcacgacgaagag

SEQ ID NO: 178 - DNA, 2601 bp, synthetic construct
  misc_feature 1..2601: note = Synthetic
  source 1..2601: mol_type = other DNA
atggctctcgtggattacggcaagcttttcgaggatctgaaccagataagcatgggtgtactggatcgggtagagttttcagaggtgatggtgatccacaggatgtatgtgaggctagctgatctgaatgtggggcagctcgagggagccgagaaagtgaagcacttgtatgtttttggcgacgttatcgagctaccagtcgtggaatggcggtggccgccgcaaataccaggatcggtgacggtgatcatattgtgtcgtcttcttcaatggccaactgatgggaggcagtcggacaccgagctccacctgacattcatgaagttgcatgccatacaacgagaggaaaatcggtgggagataaccgcagcagatggcatgaactggggagtttacatacacgcagaggaagtacaggttggcgtgctgacaatgtcatggtcttcggtacttagagtttcggcacttcgctctgttataacctccggctttcgcgccgttagtgtgtttgaggtaccgggaagtgtaaggtccacccttggagctactttaaggcccgatcacgccttatatagtacaactatgcaagccacacccaacgcatcgcatattagtgcttttaaccttcgcatagtttccccgtcggcatatcgtgtttgtcctctccaaaatgacacagatacctacttaggtattccagcagacgtggcggcagttcttccagtagacgtggtgactgatcctaacatcttgctgggcatgcagacaacggtacacattgcggagctagtcaaggcatgtcatccgtcacccgatgttgtgagcgctgtaggggagcacctgaactggctcaacaaactcttactcccacttaaggaatcgactcagttgcaaggaagcgagtcgtacaaggagtgccttgcactcttgggtcgtgttcacgctgcgatgaagatggtgagaattggcttagtagtgccccagctgcaatacagaatgtacggtagcctcatcaaccaaatggcccaagtagcacaaaactacgaccgagaattcaagcaattcaaattattcatcatccaaaatcaaatccttggcagctatttgctgcagcagaacagggcatttgctgagagggagctgcagatggagagctttcatgctgctgtcatttctcaaagaagggaggagttggacaatacattcgcaaagatggaccgattgagcgggcaaatggaggcagagagtagtgcaatggagcaagccaaaaaggaaatggacgaaggattgaggcagttccagaataggcaagttgcgaacgccctctttgccgttcttagcgctgtagctcagattgggcttgcattccttacggctggtgcaacggctcctggagctgtggcgtcggcggggcaagctgtgagcatagcaggtcaggcggcgcaaggtctgcgaagggtggtggaaattctagagcagctggaggctgtgatggaggttgtggctgctgtgaaggacctcgtggattcattggaacaggtaggtcagattgtggacgcaccggtgatgccggaattgccctcagaggcggactggtccatttttgtgaacgaggtggaggccgtggcagagggcatgccaacggaagtctcggaggttccggtgtggagggccaagtgcaagaatgtggctgcactgggtcgggagatgagcatcacggcagtacagatgtcggagctgcagtatgacatctgggtgcaaggcatgatgcgggatatggctcgaagccaggcagacaggctggccgcaattcaacccgcggaccttaccaactatttggagatggctacccagatggatatgcggactacgaggatgctgctggggctcctcaacatattgcgcatccagaatgcggcgctcaggtacgagtatcttctaatgcccacggagctcacaacatggccactgggtatggataccgtgggtgacttgctcatcgcgcaggagaatgctgcactgataggattaatgcagctagggccctcatctgatttcacgagcaggcatgtggtgaaagacatacctgtgaacttgctgctcgatggcgaggattgggagtttgagattcctgtgcaagctggcatgtccagcttcccttccagctggtctcgcgtccgtattcggcacctggagatgcactttgtgaaggaggccagcggtattggtggtgagattatccaccagcctaccacccagactgggaccgtttacatccttctgcagggttccactatcttccatgaccgcagaagagaccaggtgttgccttttcaggccgctgctccgctcaactaccattacgcgtaccgcctcgacaccggcgactccactctcacaaacgaaccctctgaacagtttgccaacaagttcatgcagatgacacccttcacccgttggaggcttcgtctgtctgcgtccgcaaaagagaatgcaggattagcctttcccacggctacagcacttgactccactacccagattgtcatcactttccatgttacggccatcagacaaattgactggcggcacgacgaagag

SEQ ID NO: 179 - DNA, 2601 bp, synthetic construct
  misc_feature 1..2601: note = Synthetic
  source 1..2601: mol_type = other DNA
atggctctcgtggattacggcaagcttttcgaggatctgaaccagataagcatgggtgtactggatcgggtagagttttcagaggtgatggtgatccacaggatgtatgtgaggctagctgatctgaatgtggggcagctcgagggagccgagaaagtgaagcacttgtatgttttttccgacgttatcgagctaccagtcgtggaatggcggtggccgccgcaaataccaggatcggtgacggtgatcatattgtgtcgtcttcttcaatggccaactgatgggaggcagtcggacaccgagctccacctgacattcatgaagttgcatgccatacaacgagaggaaaatcggtgggagataaccgcagcagatggcatgaactggggagtttacatacacgcagaggaagtacaggttggcgtgctgacaatgtcatggtcttcggtacttagagtttcggcacttcgctctgttataacctccggctttcgcgccgttagtgtgtttgaggtaccgggaagtgtaaggtccacccttggagctactttaaggcccgatcacgccttatatagtacaactatgcaagccacacccaacgcatcgcatattagtgcttttaaccttcgcatagtttccccgtcggcatatcgtgtttgtcctctccaaaatgacacagatacctacttaggtattccagcagacgtggcggcagttcttccagtagacgtggtgactgatcctaacatcttgctgggcatgcagacaacggtacacattgcggagctagtcaaggcatgtcatccgtcacccgatgttgtgagcgctgtaggggagcacctgaactggctcaacaaactcttactcccacttaaggaatcgactcagttgcaaggaagcgagtcgtacaaggagtgccttgcactcttgggtcgtgttcacgctgcgatgaagatggtgagaattggcttagtagtgccccagctgcaatacagaatgtacggtagcctcatcaaccaaatggcccaagtagcacaaaactacgaccgagaattcaagcaattcaaattattcatcatccaaaatcaaatccttggcagctatttgctgcagcagaacagggcatttgctgagagggagctgcagatggagagctttcatgctgctgtcatttctcaaagaagggaggagttggacaatacattcgcaaagatggaccgattgagcgggcaaatggaggcagagagtagtgcaatggagcaagccaaaaaggaaatggacgaaggattgaggcagttccagaataggcaagttgcgaacgccctctttgccgttcttagcgctgtagctcagattgggcttgcattccttacggctggtgcaacggctcctggagctgtggcgtcggcggggcaagctgtgagcatagcaggtcaggcggcgcaaggtctgcgaagggtggtggaaattctagagcagctggaggctgtgatggaggttgtggctgctgtgaaggacctcgtggattcattggaacaggtaggtcagattgtggacgcaccggtgatgccggaattgccctcagaggcggactggtccatttttgtgaacgaggtggaggccgtggcagagggcatgccaacggaagtctcggaggttccggtgtggagggccaagtgcaagaatgtggctgcactgggtcgggagatgagcatcacggcagtacagatgtcggagctgcagtatgacatctgggtgcaaggcatgatgcgggatatggctcgaagccaggcagacaggctggccgcaattcaacccgcggaccttaccaactatttggagatggctacccagatggatatgcggactacgaggatgctgctggggctcctcaacatattgcgcatccagaatgcggcgctcaggtacgagtatcttctaatgcccacggagctcacaacatggccactgggtatggataccgtgggtgacttgctcatcgcgcaggagaatgctgcactgataggattaatgcagctagggccctcatctgatttcacgagcaggcatgtggtgaaagacatacctgtgaacttgctgctcgatggcgaggattgggagtttgagattcctgtgcaagctggcatgtccagcttcccttccagctggtctcgcgtccgtattcggcacctggagatgcactttgtgaaggaggccagcggtattggtggtgagattatccaccagcctaccacccagactgggaccgtttacatccttctgcagggttccactatcttccatgaccgcagaagagaccaggtgttgccttttcaggccgctgctccgctcaactaccattacgcgtaccgcctcgacaccggcgactccactctcacaaacgaaccctctgaacagtttgccaacaagttcatgcagatgacacccttcacccgttggaggcttcgtctgtctgcgtccgcaaaagagaatgcaggattagcctttcccacggctacagcacttgactccactacccagattgtcatcactttccatgttacggccatcagacaaattgactggcggcacgacgaagag

SEQ ID NO: 180 - DNA, 2601 bp, synthetic construct
  misc_feature 1..2601: note = Synthetic
  source 1..2601: mol_type = other DNA
atggctctcgtggattacggcaagcttttcgaggatctgaaccagataagcatgggtgtactggatcgggtagagttttcagaggtgatggtgatccacaggatgtatgtgaggctagctgatctgaatgtggggcagctcgagggagccgagaaagtgaagcacttgtatgtttttagcgacgttctcgtgctaccagtcgtggaatggcggtggccgccgcaaataccaggatcggtgacggtgatcatattgtgtcgtcttcttcaatggccaactgatgggaggcagtcggacaccgagctccacctgacattcatgaagttgcatgccatacaacgagaggaaaatcggtgggagataaccgcagcagatggcatgaactggggagtttacatacacgcagaggaagtacaggttggcgtgctgacaatgtcatggtcttcggtacttagagtttcggcacttcgctctgttataacctccggctttcgcgccgttagtgtgtttgaggtaccgggaagtgtaaggtccacccttggagctactttaaggcccgatcacgccttatatagtacaactatgcaagccacacccaacgcatcgcatattagtgcttttaaccttcgcatagtttccccgtcggcatatcgtgtttgtcctctccaaaatgacacagatacctacttaggtattccagcagacgtggcggcagttcttccagtagacgtggtgactgatcctaacatcttgctgggcatgcagacaacggtacacattgcggagctagtcaaggcatgtcatccgtcacccgatgttgtgagcgctgtaggggagcacctgaactggctcaacaaactcttactcccacttaaggaatcgactcagttgcaaggaagcgagtcgtacaaggagtgccttgcactcttgggtcgtgttcacgctgcgatgaagatggtgagaattggcttagtagtgccccagctgcaatacagaatgtacggtagcctcatcaaccaaatggcccaagtagcacaaaactacgaccgagaattcaagcaattcaaattattcatcatccaaaatcaaatccttggcagctatttgctgcagcagaacagggcatttgctgagagggagctgcagatggagagctttcatgctgctgtcatttctcaaagaagggaggagttggacaatacattcgcaaagatggaccgattgagcgggcaaatggaggcagagagtagtgcaatggagcaagccaaaaaggaaatggacgaaggattgaggcagttccagaataggcaagttgcgaacgccctctttgccgttcttagcgctgtagctcagattgggcttgcattccttacggctggtgcaacggctcctggagctgtggcgtcggcggggcaagctgtgagcatagcaggtcaggcggcgcaaggtctgcgaagggtggtggaaattctagagcagctggaggctgtgatggaggttgtggctgctgtgaaggacctcgtggattcattggaacaggtaggtcagattgtggacgcaccggtgatgccggaattgccctcagaggcggactggtccatttttgtgaacgaggtggaggccgtggcagagggcatgccaacggaagtctcggaggttccggtgtggagggccaagtgcaagaatgtggctgcactgggtcgggagatgagcatcacggcagtacagatgtcggagctgcagtatgacatctgggtgcaaggcatgatgcgggatatggctcgaagccaggcagacaggctggccgcaattcaacccgcggaccttaccaactatttggagatggctacccagatggatatgcggactacgaggatgctgctggggctcctcaacatattgcgcatccagaatgcggcgctcaggtacgagtatcttctaatgcccacggagctcacaacatggccactgggtatggataccgtgggtgacttgctcatcgcgcaggagaatgctgcactgataggattaatgcagctagggccctcatctgatttcacgagcaggcatgtggtgaaagacatacctgtgaacttgctgctcgatggcgaggattgggagtttgagattcctgtgcaagctggcatgtccagcttcccttccagctggtctcgcgtccgtattcggcacctggagatgcactttgtgaaggaggccagcggtattggtggtgagattatccaccagcctaccacccagactgggaccgtttacatccttctgcagggttccactatcttccatgaccgcagaagagaccaggtgttgccttttcaggccgctgctccgctcaactaccattacgcgtaccgcctcgacaccggcgactccactctcacaaacgaaccctctgaacagtttgccaacaagttcatgcagatgacacccttcacccgttggaggcttcgtctgtctgcgtccgcaaaagagaatgcaggattagcctttcccacggctacagcacttgactccactacccagattgtcatcactttccatgttacggccatcagacaaattgactggcggcacgacgaagag

SEQ ID NO: 181 - DNA, 2601 bp, synthetic construct
  misc_feature 1..2601: note = Synthetic
  source 1..2601: mol_type = other DNA
atggctctcgtggattacggcaagcttttcgaggatctgaaccagataagcatgggtgtactggatcgggtagagttttcagaggtgatggtgatccacaggatgtatgtgaggctagctgatctgaatgtggggcagctcgagggagccgagaaagtgaagcagctcatcatcttttccgacatcatcgagctcccagtcgtggaatggcggtggccgccgcaaataccaggatcggtgacggtgatcatattgtgtcgtcttcttcaatggccaactgatgggaggcagtcggacaccgagctccacctgacattcatgaagttgcatgccatacaacgagaggaaaatcggtgggagataaccgcagcagatggcatgaactggggagtttacatacacgcagaggaagtacaggttggcgtgctgacaatgtcatggtcttcggtacttagagtttcggcacttcgctctgttataacctccggctttcgcgccgttagtgtgtttgaggtaccgggaagtgtaaggtccacccttggagctactttaaggcccgatcacgccttatatagtacaactatgcaagccacacccaacgcatcgcatattagtgcttttaaccttcgcatagtttccccgtcggcatatcgtgtttgtcctctccaaaatgacacagatacctacttaggtattccagcagacgtggcggcagttcttccagtagacgtggtgactgatcctaacatcttgctgggcatgcagacaacggtacacattgcggagctagtcaaggcatgtcatccgtcacccgatgttgtgagcgctgtaggggagcacctgaactggctcaacaaactcttactcccacttaaggaatcgactcagttgcaaggaagcgagtcgtacaaggagtgccttgcactcttgggtcgtgttcacgctgcgatgaagatggtgagaattggcttagtagtgccccagctgcaatacagaatgtacggtagcctcatcaaccaaatggcccaagtagcacaaaactacgaccgagaattcaagcaattcaaattattcatcatccaaaatcaaatccttggcagctatttgctgcagcagaacagggcatttgctgagagggagctgcagatggagagctttcatgctgctgtcatttctcaaagaagggaggagttggacaatacattcgcaaagatggaccgattgagcgggcaaatggaggcagagagtagtgcaatggagcaagccaaaaaggaaatggacgaaggattgaggcagttccagaataggcaagttgcgaacgccctctttgccgttcttagcgctgtagctcagattgggcttgcattccttacggctggtgcaacggctcctggagctgtggcgtcggcggggcaagctgtgagcatagcaggtcaggcggcgcaaggtctgcgaagggtggtggaaattctagagcagctggaggctgtgatggaggttgtggctgctgtgaaggacctcgtggattcattggaacaggtaggtcagattgtggacgcaccggtgatgccggaattgccctcagaggcggactggtccatttttgtgaacgaggtggaggccgtggcagagggcatgccaacggaagtctcggaggttccggtgtggagggccaagtgcaagaatgtggctgcactgggtcgggagatgagcatcacggcagtacagatgtcggagctgcagtatgacatctgggtgcaaggcatgatgcgggatatggctcgaagccaggcagacaggctggccgcaattcaacccgcggaccttaccaactatttggagatggctacccagatggatatgcggactacgaggatgctgctggggctcctcaacatattgcgcatccagaatgcggcgctcaggtacgagtatcttctaatgcccacggagctcacaacatggccactgggtatggataccgtgggtgacttgctcatcgcgcaggagaatgctgcactgataggattaatgcagctagggccctcatctgatttcacgagcaggcatgtggtgaaagacatacctgtgaacttgctgctcgatggcgaggattgggagtttgagattcctgtgcaagctggcatgtccagcttcccttccagctggtctcgcgtccgtattcggcacctggagatgcactttgtgaaggaggccagcggtattggtggtgagattatccaccagcctaccacccagactgggaccgtttacatccttctgcagggttccactatcttccatgaccgcagaagagaccaggtgttgccttttcaggccgctgctccgctcaactaccattacgcgtaccgcctcgacaccggcgactccactctcacaaacgaaccctctgaacagtttgccaacaagttcatgcagatgacacccttcacccgttggaggcttcgtctgtctgcgtccgcaaaagagaatgcaggattagcctttcccacggctacagcacttgactccactacccagattgtcatcactttccatgttacggccatcagacaaattgactggcggcacgacgaagag

SEQ ID NO: 182 - DNA, 2601 bp, synthetic construct
  misc_feature 1..2601: note = Synthetic
  source 1..2601: mol_type = other DNA
atggctctcgtggattacggcaagcttttcgaggatctgaaccagataagcatgggtgtactggatcgggtagagttttcagaggtgatggtgatccacaggatgtatgtgaggctagctgatctgaatgtggggcagctcgagggagccgagaaagtgaagcagttgtatattttttgcgacattatcgagctaccagtcgtggaatggcggtggccgccgcaaataccaggatcggtgacggtgatcatattgtgtcgtcttcttcaatggccaactgatgggaggcagtcggacaccgagctccacctgacattcatgaagttgcatgccatacaacgagaggaaaatcggtgggagataaccgcagcagatggcatgaactggggagtttacatacacgcagaggaagtacaggttggcgtgctgacaatgtcatggtcttcggtacttagagtttcggcacttcgctctgttataacctccggctttcgcgccgttagtgtgtttgaggtaccgggaagtgtaaggtccacccttggagctactttaaggcccgatcacgccttatatagtacaactatgcaagccacacccaacgcatcgcatattagtgcttttaaccttcgcatagtttccccgtcggcatatcgtgtttgtcctctccaaaatgacacagatacctacttaggtattccagcagacgtggcggcagttcttccagtagacgtggtgactgatcctaacatcttgctgggcatgcagacaacggtacacattgcggagctagtcaaggcatgtcatccgtcacccgatgttgtgagcgctgtaggggagcacctgaactggctcaacaaactcttactcccacttaaggaatcgactcagttgcaaggaagcgagtcgtacaaggagtgccttgcactcttgggtcgtgttcacgctgcgatgaagatggtgagaattggcttagtagtgccccagctgcaatacagaatgtacggtagcctcatcaaccaaatggcccaagtagcacaaaactacgaccgagaattcaagcaattcaaattattcatcatccaaaatcaaatccttggcagctatttgctgcagcagaacagggcatttgctgagagggagctgcagatggagagctttcatgctgctgtcatttctcaaagaagggaggagttggacaatacattcgcaaagatggaccgattgagcgggcaaatggaggcagagagtagtgcaatggagcaagccaaaaaggaaatggacgaaggattgaggcagttccagaataggcaagttgcgaacgccctctttgccgttcttagcgctgtagctcagattgggcttgcattccttacggctggtgcaacggctcctggagctgtggcgtcggcggggcaagctgtgagcatagcaggtcaggcggcgcaaggtctgcgaagggtggtggaaattctagagcagctggaggctgtgatggaggttgtggctgctgtgaaggacctcgtggattcattggaacaggtaggtcagattgtggacgcaccggtgatgccggaattgccctcagaggcggactggtccatttttgtgaacgaggtggaggccgtggcagagggcatgccaacggaagtctcggaggttccggtgtggagggccaagtgcaagaatgtggctgcactgggtcgggagatgagcatcacggcagtacagatgtcggagctgcagtatgacatctgggtgcaaggcatgatgcgggatatggctcgaagccaggcagacaggctggccgcaattcaacccgcggaccttaccaactatttggagatggctacccagatggatatgcggactacgaggatgctgctggggctcctcaacatattgcgcatccagaatgcggcgctcaggtacgagtatcttctaatgcccacggagctcacaacatggccactgggtatggataccgtgggtgacttgctcatcgcgcaggagaatgctgcactgataggattaatgcagctagggccctcatctgatttcacgagcaggcatgtggtgaaagacatacctgtgaacttgctgctcgatggcgaggattgggagtttgagattcctgtgcaagctggcatgtccagcttcccttccagctggtctcgcgtccgtattcggcacctggagatgcactttgtgaaggaggccagcggtattggtggtgagattatccaccagcctaccacccagactgggaccgtttacatccttctgcagggttccactatcttccatgaccgcagaagagaccaggtgttgccttttcaggccgctgctccgctcaactaccattacgcgtaccgcctcgacaccggcgactccactctcacaaacgaaccctctgaacagtttgccaacaagttcatgcagatgacacccttcacccgttggaggcttcgtctgtctgcgtccgcaaaagagaatgcaggattagcctttcccacggctacagcacttgactccactacccagattgtcatcactttccatgttacggccatcagacaaattgactggcggcacgacgaagag

SEQ ID NO: 183 - DNA, 2601 bp, synthetic construct
  misc_feature 1..2601: note = Synthetic
  source 1..2601: mol_type = other DNA
atggctctcgtggattacggcaagcttttcgaggatctgaaccagataagcatgggtgtactggatcgggtagagttttcagaggtgatggtgatccacaggatgtatgtgaggctagctgatctgaatgtggggcagctcgagggagccgagaaagtgaagcagttgtatattttttgcgacgttctcgagctaccagtcgtggaatggcggtggccgccgcaaataccaggatcggtgacggtgatcatattgtgtcgtcttcttcaatggccaactgatgggaggcagtcggacaccgagctccacctgacattcatgaagttgcatgccatacaacgagaggaaaatcggtgggagataaccgcagcagatggcatgaactggggagtttacatacacgcagaggaagtacaggttggcgtgctgacaatgtcatggtcttcggtacttagagtttcggcacttcgctctgttataacctccggctttcgcgccgttagtgtgtttgaggtaccgggaagtgtaaggtccacccttggagctactttaaggcccgatcacgccttatatagtacaactatgcaagccacacccaacgcatcgcatattagtgcttttaaccttcgcatagtttccccgtcggcatatcgtgtttgtcctctccaaaatgacacagatacctacttaggtattccagcagacgtggcggcagttcttccagtagacgtggtgactgatcctaacatcttgctgggcatgcagacaacggtacacattgcggagctagtcaaggcatgtcatccgtcacccgatgttgtgagcgctgtaggggagcacctgaactggctcaacaaactcttactcccacttaaggaatcgactcagttgcaaggaagcgagtcgtacaaggagtgccttgcactcttgggtcgtgttcacgctgcgatgaagatggtgagaattggcttagtagtgccccagctgcaatacagaatgtacggtagcctcatcaaccaaatggcccaagtagcacaaaactacgaccgagaattcaagcaattcaaattattcatcatccaaaatcaaatccttggcagctatttgctgcagcagaacagggcatttgctgagagggagctgcagatggagagctttcatgctgctgtcatttctcaaagaagggaggagttggacaatacattcgcaaagatggaccgattgagcgggcaaatggaggcagagagtagtgcaatggagcaagccaaaaaggaaatggacgaaggattgaggcagttccagaataggcaagttgcgaacgccctctttgccgttcttagcgctgtagctcagattgggcttgcattccttacggctggtgcaacggctcctggagctgtggcgtcggcggggcaagctgtgagcatagcaggtcaggcggcgcaaggtctgcgaagggtggtggaaattctagagcagctggaggctgtgatggaggttgtggctgctgtgaaggacctcgtggattcattggaacaggtaggtcagattgtggacgcaccggtgatgccggaattgccctcagaggcggactggtccatttttgtgaacgaggtggaggccgtggcagagggcatgccaacggaagtctcggaggttccggtgtggagggccaagtgcaagaatgtggctgcactgggtcgggagatgagcatcacggcagtacagatgtcggagctgcagtatgacatctgggtgcaaggcatgatgcgggatatggctcgaagccaggcagacaggctggccgcaattcaacccgcggaccttaccaactatttggagatggctacccagatggatatgcggactacgaggatgctgctggggctcctcaacatattgcgcatccagaatgcggcgctcaggtacgagtatcttctaatgcccacggagctcacaacatggccactgggtatggataccgtgggtgacttgctcatcgcgcaggagaatgctgcactgataggattaatgcagctagggccctcatctgatttcacgagcaggcatgtggtgaaagacatacctgtgaacttgctgctcgatggcgaggattgggagtttgagattcctgtgcaagctggcatgtccagcttcccttccagctggtctcgcgtccgtattcggcacctggagatgcactttgtgaaggaggccagcggtattggtggtgagattatccaccagcctaccacccagactgggaccgtttacatccttctgcagggttccactatcttccatgaccgcagaagagaccaggtgttgccttttcaggccgctgctccgctcaactaccattacgcgtaccgcctcgacaccggcgactccactctcacaaacgaaccctctgaacagtttgccaacaagttcatgcagatgacacccttcacccgttggaggcttcgtctgtctgcgtccgcaaaagagaatgcaggattagcctttcccacggctacagcacttgactccactacccagattgtcatcactttccatgttacggccatcagacaaattgactggcggcacgacgaagag

SEQ ID NO: 184 - DNA, 2601 bp, synthetic construct
  misc_feature 1..2601: note = Synthetic
  source 1..2601: mol_type = other DNA
atggctctcgtggattacggcaagcttttcgaggatctgaaccagataagcatgggtgtactggatcgggtagagttttcagaggtgatggtgatccacaggatgtatgtgaggctagctgatctgaatgtggggcagctcgagggagccgagaaagtgaagcagttgtatatttttggcgacgttatcgagctaccagtcgtggaatggcggtggccgccgcaaataccaggatcggtgacggtgatcatattgtgtcgtcttcttcaatggccaactgatgggaggcagtcggacaccgagctccacctgacattcatgaagttgcatgccatacaacgagaggaaaatcggtgggagataaccgcagcagatggcatgaactggggagtttacatacacgcagaggaagtacaggttggcgtgctgacaatgtcatggtcttcggtacttagagtttcggcacttcgctctgttataacctccggctttcgcgccgttagtgtgtttgaggtaccgggaagtgtaaggtccacccttggagctactttaaggcccgatcacgccttatatagtacaactatgcaagccacacccaacgcatcgcatattagtgcttttaaccttcgcatagtttccccgtcggcatatcgtgtttgtcctctccaaaatgacacagatacctacttaggtattccagcagacgtggcggcagttcttccagtagacgtggtgactgatcctaacatcttgctgggcatgcagacaacggtacacattgcggagctagtcaaggcatgtcatccgtcacccgatgttgtgagcgctgtaggggagcacctgaactggctcaacaaactcttactcccacttaaggaatcgactcagttgcaaggaagcgagtcgtacaaggagtgccttgcactcttgggtcgtgttcacgctgcgatgaagatggtgagaattggcttagtagtgccccagctgcaatacagaatgtacggtagcctcatcaaccaaatggcccaagtagcacaaaactacgaccgagaattcaagcaattcaaattattcatcatccaaaatcaaatccttggcagctatttgctgcagcagaacagggcatttgctgagagggagctgcagatggagagctttcatgctgctgtcatttctcaaagaagggaggagttggacaatacattcgcaaagatggaccgattgagcgggcaaatggaggcagagagtagtgcaatggagcaagccaaaaaggaaatggacgaaggattgaggcagttccagaataggcaagttgcgaacgccctctttgccgttcttagcgctgtagctcagattgggcttgcattccttacggctggtgcaacggctcctggagctgtggcgtcggcggggcaagctgtgagcatagcaggtcaggcggcgcaaggtctgcgaagggtggtggaaattctagagcagctggaggctgtgatggaggttgtggctgctgtgaaggacctcgtggattcattggaacaggtaggtcagattgtggacgcaccggtgatgccggaattgccctcagaggcggactggtccatttttgtgaacgaggtggaggccgtggcagagggcatgccaacggaagtctcggaggttccggtgtggagggccaagtgcaagaatgtggctgcactgggtcgggagatgagcatcacggcagtacagatgtcggagctgcagtatgacatctgggtgcaaggcatgatgcgggatatggctcgaagccaggcagacaggctggccgcaattcaacccgcggaccttaccaactatttggagatggctacccagatggatatgcggactacgaggatgctgctggggctcctcaacatattgcgcatccagaatgcggcgctcaggtacgagtatcttctaatgcccacggagctcacaacatggccactgggtatggataccgtgggtgacttgctcatcgcgcaggagaatgctgcactgataggattaatgcagctagggccctcatctgatttcacgagcaggcatgtggtgaaagacatacctgtgaacttgctgctcgatggcgaggattgggagtttgagattcctgtgcaagctggcatgtccagcttcccttccagctggtctcgcgtccgtattcggcacctggagatgcactttgtgaaggaggccagcggtattggtggtgagattatccaccagcctaccacccagactgggaccgtttacatccttctgcagggttccactatcttccatgaccgcagaagagaccaggtgttgccttttcaggccgctgctccgctcaactaccattacgcgtaccgcctcgacaccggcgactccactctcacaaacgaaccctctgaacagtttgccaacaagttcatgcagatgacacccttcacccgttggaggcttcgtctgtctgcgtccgcaaaagagaatgcaggattagcctttcccacggctacagcacttgactccactacccagattgtcatcactttccatgttacggccatcagacaaattgactggcggcacgacgaagag

SEQ ID NO: 185 - DNA, 2601 bp, synthetic construct
  misc_feature 1..2601: note = Synthetic
  source 1..2601: mol_type = other DNA
atggctctcgtggattacggcaagcttttcgaggatctgaaccagataagcatgggtgtactggatcggatagagttttcagaggtgatggtgatccacaggatgtatgtgaggctagctgatctgaatgtggggcagctcgagggagccgagaaagtgaagcagttgtatatttttagcgacattatcgagctaccagtcgtggaatggcggtggccgccgcaaataccaggatcggtgacggtgatcatattgtgtcgtcttcttcaatggccaactgatgggaggcagtcggacaccgagctccacctgacattcatgaagttgcatgccatacaacgagaggaaaatcggtgggagataaccgcagcagatggcatgaactggggagtttacatacacgcagaggaagtacaggttggcgtgctgacaatgtcatggtcttcggtacttagagtttcggcacttcgctctgttataacctccggctttcgcgccgttagtgtgtttgaggtaccgggaagtgtaaggtccacccttggagctactttaaggcccgatcacgccttatatagtacaactatgcaagccacacccaacgcatcgcatattagtgcttttaaccttcgcatagtttccccgtcggcatatcgtgtttgtcctctccaaaatgacacagatacctacttaggtattccagcagacgtggcggcagttcttccagtagacgtggtgactgatcctaacatcttgctgggcatgcagacaacggtacacattgcggagctagtcaaggcatgtcatccgtcacccgatgttgtgagcgctgtaggggagcacctgaactggctcaacaaactcttactcccacttaaggaatcgactcagttgcaaggaagcgagtcgtacaaggagtgccttgcactcttgggtcgtgttcacgctgcgatgaagatggtgagaattggcttagtagtgccccagctgcaatacagaatgtacggtagcctcatcaaccaaatggcccaagtagcacaaaactacgaccgagaattcaagcaattcaaattattcatcatccaaaatcaaatccttggcagctatttgctgcagcagaacagggcatttgctgagagggagctgcagatggagagctttcatgctgctgtcatttctcaaagaagggaggagttggacaatacattcgcaaagatggaccgattgagcgggcaaatggaggcagagagtagtgcaatggagcaagccaaaaaggaaatggacgaaggattgaggcagttccagaataggcaagttgcgaacgccctctttgccgttcttagcgctgtagctcagattgggcttgcattccttacggctggtgcaacggctcctggagctgtggcgtcggcggggcaagctgtgagcatagcaggtcaggcggcgcaaggtctgcgaagggtggtggaaattctagagcagctggaggctgtgatggaggttgtggctgctgtgaaggacctcgtggattcattggaacaggtaggtcagattgtggacgcaccggtgatgccggaattgccctcagaggcggactggtccatttttgtgaacgaggtggaggccgtggcagagggcatgccaacggaagtctcggaggttccggtgtggagggccaagtgcaagaatgtggctgcactgggtcgggagatgagcatcacggcagtacagatgtcggagctgcagtatgacatctgggtgcaaggcatgatgcgggatatggctcgaagccaggcagacaggctggccgcaattcaacccgcggaccttaccaactatttggagatggctacccagatggatatgcggactacgaggatgctgctggggctcctcaacatattgcgcatccagaatgcggcgctcaggtacgagtatcttctaatgcccacggagctcacaacatggccactgggtatggataccgtgggtgacttgctcatcgcgcaggagaatgctgcactgataggattaatgcagctagggccctcatctgatttcacgagcaggcatgtggtgaaagacatacctgtgaacttgctgctcgatggcgaggattgggagtttgagattcctgtgcaagctggcatgtccagcttcccttccagctggtctcgcgtccgtattcggcacctggagatgcactttgtgaaggaggccagcggtattggtggtgagattatccaccagcctaccacccagactgggaccgtttacatccttctgcagggttccactatcttccatgaccgcagaagagaccaggtgttgccttttcaggccgctgctccgctcaactaccattacgcgtaccgcctcgacaccggcgactccactctcacaaacgaaccctctgaacagtttgccaacaagttcatgcagatgacacccttcacccgttggaggcttcgtctgtctgcgtccgcaaaagagaatgcaggattagcctttcccacggctacagcacttgactccactacccagattgtcatcactttccatgttacggccatcagacaaattgactggcggcacgacgaagag

SEQ ID NO: 186 - DNA, 2601 bp, synthetic construct
  misc_feature 1..2601: note = Synthetic
  source 1..2601: mol_type = other DNA
atggctctcgtggattacggcaagcttttcgaggatctgaaccagataagcatgggtgtactggatcgggtagagttttcagaggtgatggtgatccacaggatgtatgtgaggctagctgatctgaatgtggggcagctcgagggagccgagaaagtgaagcagttgtatgttttttgcgacattctcgagctaccagtcgtggaatggcggtggccgccgcaaataccaggatcggtgacggtgatcatattgtgtcgtcttcttcaatggccaactgatgggaggcagtcggacaccgagctccacctgacattcatgaagttgcatgccatacaacgagaggaaaatcggtgggagataaccgcagcagatggcatgaactggggagtttacatacacgcagaggaagtacaggttggcgtgctgacaatgtcatggtcttcggtacttagagtttcggcacttcgctctgttataacctccggctttcgcgccgttagtgtgtttgaggtaccgggaagtgtaaggtccacccttggagctactttaaggcccgatcacgccttatatagtacaactatgcaagccacacccaacgcatcgcatattagtgcttttaaccttcgcatagtttccccgtcggcatatcgtgtttgtcctctccaaaatgacacagatacctacttaggtattccagcagacgtggcggcagttcttccagtagacgtggtgactgatcctaacatcttgctgggcatgcagacaacggtacacattgcggagctagtcaaggcatgtcatccgtcacccgatgttgtgagcgctgtaggggagcacctgaactggctcaacaaactcttactcccacttaaggaatcgactcagttgcaaggaagcgagtcgtacaaggagtgccttgcactcttgggtcgtgttcacgctgcgatgaagatggtgagaattggcttagtagtgccccagctgcaatacagaatgtacggtagcctcatcaaccaaatggcccaagtagcacaaaactacgaccgagaattcaagcaattcaaattattcatcatccaaaatcaaatccttggcagctatttgctgcagcagaacagggcatttgctgagagggagctgcagatggagagctttcatgctgctgtcatttctcaaagaagggaggagttggacaatacattcgcaaagatggaccgattgagcgggcaaatggaggcagagagtagtgcaatggagcaagccaaaaaggaaatggacgaaggattgaggcagttccagaataggcaagttgcgaacgccctctttgccgttcttagcgctgtagctcagattgggcttgcattccttacggctggtgcaacggctcctggagctgtggcgtcggcggggcaagctgtgagcatagcaggtcaggcggcgcaaggtctgcgaagggtggtggaaattctagagcagctggaggctgtgatggaggttgtggctgctgtgaaggacctcgtggattcattggaacaggtaggtcagattgtggacgcaccggtgatgccggaattgccctcagaggcggactggtccatttttgtgaacgaggtggaggccgtggcagagggcatgccaacggaagtctcggaggttccggtgtggagggccaagtgcaagaatgtggctgcactgggtcgggagatgagcatcacggcagtacagatgtcggagctgcagtatgacatctgggtgcaaggcatgatgcgggatatggctcgaagccaggcagacaggctggccgcaattcaacccgcggaccttaccaactatttggagatggctacccagatggatatgcggactacgaggatgctgctggggctcctcaacatattgcgcatccagaatgcggcgctcaggtacgagtatcttctaatgcccacggagctcacaacatggccactgggtatggataccgtgggtgacttgctcatcgcgcaggagaatgctgcactgataggattaatgcagctagggccctcatctgatttcacgagcaggcatgtggtgaaagacatacctgtgaacttgctgctcgatggcgaggattgggagtttgagattcctgtgcaagctggcatgtccagcttcccttccagctggtctcgcgtccgtattcggcacctggagatgcactttgtgaaggaggccagcggtattggtggtgagattatccaccagcctaccacccagactgggaccgtttacatccttctgcagggttccactatcttccatgaccgcagaagagaccaggtgttgccttttcaggccgctgctccgctcaactaccattacgcgtaccgcctcgacaccggcgactccactctcacaaacgaaccctctgaacagtttgccaacaagttcatgcagatgacacccttcacccgttggaggcttcgtctgtctgcgtccgcaaaagagaatgcaggattagcctttcccacggctacagcacttgactccactacccagattgtcatcactttccatgttacggccatcagacaaattgactggcggcacgacgaagag

SEQ ID NO: 187 - DNA, 2601 bp, synthetic construct
  misc_feature 1..2601: note = Synthetic
  source 1..2601: mol_type = other DNA
atggctctcgtggattacggcaagcttttcgaggatctgaaccagataagcatgggtgtactggatcgggtagagttttcagaggtgatggtgatccacaggatgtatgtgaggctagctgatctgaatgtggggcagctcgagggagccgagaaagtgaagcagttgtatgtttttagcgacattctcgagctaccagtcgtggaatggcggtggccgccgcaaataccaggatcggtgacggtgatcatattgtgtcgtcttcttcaatggccaactgatgggaggcagtcggacaccgagctccacctgacattcatgaagttgcatgccatacaacgagaggaaaatcggtgggagataaccgcagcagatggcatgaactggggagtttacatacacgcagaggaagtacaggttggcgtgctgacaatgtcatggtcttcggtacttagagtttcggcacttcgctctgttataacctccggctttcgcgccgttagtgtgtttgaggtaccgggaagtgtaaggtccacccttggagctactttaaggcccgatcacgccttatatagtacaactatgcaagccacacccaacgcatcgcatattagtgcttttaaccttcgcatagtttccccgtcggcatatcgtgtttgtcctctccaaaatgacacagatacctacttaggtattccagcagacgtggcggcagttcttccagtagacgtggtgactgatcctaacatcttgctgggcatgcagacaacggtacacattgcggagctagtcaaggcatgtcatccgtcacccgatgttgtgagcgctgtaggggagcacctgaactggctcaacaaactcttactcccacttaaggaatcgactcagttgcaaggaagcgagtcgtacaaggagtgccttgcactcttgggtcgtgttcacgctgcgatgaagatggtgagaattggcttagtagtgccccagctgcaatacagaatgtacggtagcctcatcaaccaaatggcccaagtagcacaaaactacgaccgagaattcaagcaattcaaattattcatcatccaaaatcaaatccttggcagctatttgctgcagcagaacagggcatttgctgagagggagctgcagatggagagctttcatgctgctgtcatttctcaaagaagggaggagttggacaatacattcgcaaagatggaccgattgagcgggcaaatggaggcagagagtagtgcaatggagcaagccaaaaaggaaatggacgaaggattgaggcagttccagaataggcaagttgcgaacgccctctttgccgttcttagcgctgtagctcagattgggcttgcattccttacggctggtgcaacggctcctggagctgtggcgtcggcggggcaagctgtgagcatagcaggtcaggcggcgcaaggtctgcgaagggtggtggaaattctagagcagctggaggctgtgatggaggttgtggctgctgtgaaggacctcgtggattcattggaacaggtaggtcagattgtggacgcaccggtgatgccggaattgccctcagaggcggactggtccatttttgtgaacgaggtggaggccgtggcagagggcatgccaacggaagtctcggaggttccggtgtggagggccaagtgcaagaatgtggctgcactgggtcgggagatgagcatcacggcagtacagatgtcggagctgcagtatgacatctgggtgcaaggcatgatgcgggatatggctcgaagccaggcagacaggctggccgcaattcaacccgcggaccttaccaactatttggagatggctacccagatggatatgcggactacgaggatgctgctggggctcctcaacatattgcgcatccagaatgcggcgctcaggtacgagtatcttctaatgcccacggagctcacaacatggccactgggtatggataccgtgggtgacttgctcatcgcgcaggagaatgctgcactgataggattaatgcagctagggccctcatctgatttcacgagcaggcatgtggtgaaagacatacctgtgaacttgctgctcgatggcgaggattgggagtttgagattcctgtgcaagctggcatgtccagcttcccttccagctggtctcgcgtccgtattcggcacctggagatgcactttgtgaaggaggccagcggtattggtggtgagattatccaccagcctaccacccagactgggaccgtttacatccttctgcagggttccactatcttccatgaccgcagaagagaccaggtgttgccttttcaggccgctgctccgctcaactaccattacgcgtaccgcctcgacaccggcgactccactctcacaaacgaaccctctgaacagtttgccaacaagttcatgcagatgacacccttcacccgttggaggcttcgtctgtctgcgtccgcaaaagagaatgcaggattagcctttcccacggctacagcacttgactccactacccagattgtcatcactttccatgttacggccatcagacaaattgactggcggcacgacgaagag

SEQ ID NO: 188 - DNA, 2601 bp, synthetic construct
  misc_feature 1..2601: note = Synthetic
  source 1..2601: mol_type = other DNA
atggctctcgtggattacggcaagcttttcgaggatctgaaccagataagcatgggtgtactggatcgggtagagttttcagaggtgatggtgatccacaggatgtatgtgaggctagctgatctgaatgtggggcagctcgagggagccgagaaagtgaagcagttgtatgtttttagcgacgttctcgtgctaccagtcgtggaatggcggtggccgccgcaaataccaggatcggtgacggtgatcatattgtgtcgtcttcttcaatggccaactgatgggaggcagtcggacaccgagctccacctgacattcatgaagttgcatgccatacaacgagaggaaaatcggtgggagataaccgcagcagatggcatgaactggggagtttacatacacgcagaggaagtacaggttggcgtgctgacaatgtcatggtcttcggtacttagagtttcggcacttcgctctgttataacctccggctttcgcgccgttagtgtgtttgaggtaccgggaagtgtaaggtccacccttggagctactttaaggcccgatcacgccttatatagtacaactatgcaagccacacccaacgcatcgcatattagtgcttttaaccttcgcatagtttccccgtcggcatatcgtgtttgtcctctccaaaatgacacagatacctacttaggtattccagcagacgtggcggcagttcttccagtagacgtggtgactgatcctaacatcttgctgggcatgcagacaacggtacacattgcggagctagtcaaggcatgtcatccgtcacccgatgttgtgagcgctgtaggggagcacctgaactggctcaacaaactcttactcccacttaaggaatcgactcagttgcaaggaagcgagtcgtacaaggagtgccttgcactcttgggtcgtgttcacgctgcgatgaagatggtgagaattggcttagtagtgccccagctgcaatacagaatgtacggtagcctcatcaaccaaatggcccaagtagcacaaaactacgaccgagaattcaagcaattcaaattattcatcatccaaaatcaaatccttggcagctatttgctgcagcagaacagggcatttgctgagagggagctgcagatggagagctttcatgctgctgtcatttctcaaagaagggaggagttggacaatacattcgcaaagatggaccgattgagcgggcaaatggaggcagagagtagtgcaatggagcaagccaaaaaggaaatggacgaaggattgaggcagttccagaataggcaagttgcgaacgccctctttgccgttcttagcgctgtagctcagattgggcttgcattccttacggctggtgcaacggctcctggagctgtggcgtcggcggggcaagctgtgagcatagcaggtcaggcggcgcaaggtctgcgaagggtggtggaaattctagagcagctggaggctgtgatggaggttgtggctgctgtgaaggacctcgtggattcattggaacaggtaggtcagattgtggacgcaccggtgatgccggaattgccctcagaggcggactggtccatttttgtgaacgaggtggaggccgtggcagagggcatgccaacggaagtctcggaggttccggtgtggagggccaagtgcaagaatgtggctgcactgggtcgggagatgagcatcacggcagtacagatgtcggagctgcagtatgacatctgggtgcaaggcatgatgcgggatatggctcgaagccaggcagacaggctggccgcaattcaacccgcggaccttaccaactatttggagatggctacccagatggatatgcggactacgaggatgctgctggggctcctcaacatattgcgcatccagaatgcggcgctcaggtacgagtatcttctaatgcccacggagctcacaacatggccactgggtatggataccgtgggtgacttgctcatcgcgcaggagaatgctgcactgataggattaatgcagctagggccctcatctgatttcacgagcaggcatgtggtgaaagacatacctgtgaacttgctgctcgatggcgaggattgggagtttgagattcctgtgcaagctggcatgtccagcttcccttccagctggtctcgcgtccgtattcggcacctggagatgcactttgtgaaggaggccagcggtattggtggtgagattatccaccagcctaccacccagactgggaccgtttacatccttctgcagggttccactatcttccatgaccgcagaagagaccaggtgttgccttttcaggccgctgctccgctcaactaccattacgcgtaccgcctcgacaccggcgactccactctcacaaacgaaccctctgaacagtttgccaacaagttcatgcagatgacacccttcacccgttggaggcttcgtctgtctgcgtccgcaaaagagaatgcaggattagcctttcccacggctacagcacttgactccactacccagattgtcatcactttccatgttacggccatcagacaaattgactggcggcacgacgaagag

SEQ ID NO: 189 - DNA, 2601 bp, synthetic construct
  misc_feature 1..2601: note = Synthetic
  source 1..2601: mol_type = other DNA
atggctctcgtggattacggcaagcttttcgaggatctgaaccagataagcatgggtgtactggatcgggtagagttttcagaggtgatggtgatccacaggatgtatgtgaggctagctgatctgaatgtggggcagctcgagggagccgagaaagtgaagcgcttctatatctttgccgacatcgtcgagctcccagtcgtggaatggcggtggccgccgcaaataccaggatcggtgacggtgatcatattgtgtcgtcttcttcaatggccaactgatgggaggcagtcggacaccgagctccacctgacattcatgaagttgcatgccatacaacgagaggaaaatcggtgggagataaccgcagcagatggcatgaactggggagtttacatacacgcagaggaagtacaggttggcgtgctgacaatgtcatggtcttcggtacttagagtttcggcacttcgctctgttataacctccggctttcgcgccgttagtgtgtttgaggtaccgggaagtgtaaggtccacccttggagctactttaaggcccgatcacgccttatatagtacaactatgcaagccacacccaacgcatcgcatattagtgcttttaaccttcgcatagtttccccgtcggcatatcgtgtttgtcctctccaaaatgacacagatacctacttaggtattccagcagacgtggcggcagttcttccagtagacgtggtgactgatcctaacatcttgctgggcatgcagacaacggtacacattgcggagctagtcaaggcatgtcatccgtcacccgatgttgtgagcgctgtaggggagcacctgaactggctcaacaaactcttactcccacttaaggaatcgactcagttgcaaggaagcgagtcgtacaaggagtgccttgcactcttgggtcgtgttcacgctgcgatgaagatggtgagaattggcttagtagtgccccagctgcaatacagaatgtacggtagcctcatcaaccaaatggcccaagtagcacaaaactacgaccgagaattcaagcaattcaaattattcatcatccaaaatcaaatccttggcagctatttgctgcagcagaacagggcatttgctgagagggagctgcagatggagagctttcatgctgctgtcatttctcaaagaagggaggagttggacaatacattcgcaaagatggaccgattgagcgggcaaatggaggcagagagtagtgcaatggagcaagccaaaaaggaaatggacgaaggattgaggcagttccagaataggcaagttgcgaacgccctctttgccgttcttagcgctgtagctcagattgggcttgcattccttacggctggtgcaacggctcctggagctgtggcgtcggcggggcaagctgtgagcatagcaggtcaggcggcgcaaggtctgcgaagggtggtggaaattctagagcagctggaggctgtgatggaggttgtggctgctgtgaaggacctcgtggattcattggaacaggtaggtcagattgtggacgcaccggtgatgccggaattgccctcagaggcggactggtccatttttgtgaacgaggtggaggccgtggcagagggcatgccaacggaagtctcggaggttccggtgtggagggccaagtgcaagaatgtggctgcactgggtcgggagatgagcatcacggcagtacagatgtcggagctgcagtatgacatctgggtgcaaggcatgatgcgggatatggctcgaagccaggcagacaggctggccgcaattcaacccgcggaccttaccaactatttggagatggctacccagatggatatgcggactacgaggatgctgctggggctcctcaacatattgcgcatccagaatgcggcgctcaggtacgagtatcttctaatgcccacggagctcacaacatggccactgggtatggataccgtgggtgacttgctcatcgcgcaggagaatgctgcactgataggattaatgcagctagggccctcatctgatttcacgagcaggcatgtggtgaaagacatacctgtgaacttgctgctcgatggcgaggattgggagtttgagattcctgtgcaagctggcatgtccagcttcccttccagctggtctcgcgtccgtattcggcacctggagatgcactttgtgaaggaggccagcggtattggtggtgagattatccaccagcctaccacccagactgggaccgtttacatccttctgcagggttccactatcttccatgaccgcagaagagaccaggtgttgccttttcaggccgctgctccgctcaactaccattacgcgtaccgcctcgacaccggcgactccactctcacaaacgaaccctctgaacagtttgccaacaagttcatgcagatgacacccttcacccgttggaggcttcgtctgtctgcgtccgcaaaagagaatgcaggattagcctttcccacggctacagcacttgactccactacccagattgtcatcactttccatgttacggccatcagacaaattgactggcggcacgacgaagag

SEQ ID NO: 190 - DNA, 2601 bp, synthetic construct
  misc_feature 1..2601: note = Synthetic
  source 1..2601: mol_type = other DNA
atggctctcgtggattacggcaagcttttcgaggatctgaaccagataagcatgggtgtactggatcgggtagagttttcagaggtgatggtgatccacaggatgtatgtgaggctagctgatctgaatgtggggcagctcgagggagccgagaaagtgaagcgcttctatatcttttccgacatcatcgagctcccagtcgtggaatggcggtggccgccgcaaataccaggatcggtgacggtgatcatattgtgtcgtcttcttcaatggccaactgatgggaggcagtcggacaccgagctccacctgacattcatgaagttgcatgccatacaacgagaggaaaatcggtgggagataaccgcagcagatggcatgaactggggagtttacatacacgcagaggaagtacaggttggcgtgctgacaatgtcatggtcttcggtacttagagtttcggcacttcgctctgttataacctccggctttcgcgccgttagtgtgtttgaggtaccgggaagtgtaaggtccacccttggagctactttaaggcccgatcacgccttatatagtacaactatgcaagccacacccaacgcatcgcatattagtgcttttaaccttcgcatagtttccccgtcggcatatcgtgtttgtcctctccaaaatgacacagatacctacttaggtattccagcagacgtggcggcagttcttccagtagacgtggtgactgatcctaacatcttgctgggcatgcagacaacggtacacattgcggagctagtcaaggcatgtcatccgtcacccgatgttgtgagcgctgtaggggagcacctgaactggctcaacaaactcttactcccacttaaggaatcgactcagttgcaaggaagcgagtcgtacaaggagtgccttgcactcttgggtcgtgttcacgctgcgatgaagatggtgagaattggcttagtagtgccccagctgcaatacagaatgtacggtagcctcatcaaccaaatggcccaagtagcacaaaactacgaccgagaattcaagcaattcaaattattcatcatccaaaatcaaatccttggcagctatttgctgcagcagaacagggcatttgctgagagggagctgcagatggagagctttcatgctgctgtcatttctcaaagaagggaggagttggacaatacattcgcaaagatggaccgattgagcgggcaaatggaggcagagagtagtgcaatggagcaagccaaaaaggaaatggacgaaggattgaggcagttccagaataggcaagttgcgaacgccctctttgccgttcttagcgctgtagctcagattgggcttgcattccttacggctggtgcaacggctcctggagctgtggcgtcggcggggcaagctgtgagcatagcaggtcaggcggcgcaaggtctgcgaagggtggtggaaattctagagcagctggaggctgtgatggaggttgtggctgctgtgaaggacctcgtggattcattggaacaggtaggtcagattgtggacgcaccggtgatgccggaattgccctcagaggcggactggtccatttttgtgaacgaggtggaggccgtggcagagggcatgccaacggaagtctcggaggttccggtgtggagggccaagtgcaagaatgtggctgcactgggtcgggagatgagcatcacggcagtacagatgtcggagctgcagtatgacatctgggtgcaaggcatgatgcgggatatggctcgaagccaggcagacaggctggccgcaattcaacccgcggaccttaccaactatttggagatggctacccagatggatatgcggactacgaggatgctgctggggctcctcaacatattgcgcatccagaatgcggcgctcaggtacgagtatcttctaatgcccacggagctcacaacatggccactgggtatggataccgtgggtgacttgctcatcgcgcaggagaatgctgcactgataggattaatgcagctagggccctcatctgatttcacgagcaggcatgtggtgaaagacatacctgtgaacttgctgctcgatggcgaggattgggagtttgagattcctgtgcaagctggcatgtccagcttcccttccagctggtctcgcgtccgtattcggcacctggagatgcactttgtgaaggaggccagcggtattggtggtgagattatccaccagcctaccacccagactgggaccgtttacatccttctgcagggttccactatcttccatgaccgcagaagagaccaggtgttgccttttcaggccgctgctccgctcaactaccattacgcgtaccgcctcgacaccggcgactccactctcacaaacgaaccctctgaacagtttgccaacaagttcatgcagatgacacccttcacccgttggaggcttcgtctgtctgcgtccgcaaaagagaatgcaggattagcctttcccacggctacagcacttgactccactacccagattgtcatcactttccatgttacggccatcagacaaattgactggcggcacgacgaagag

SEQ ID NO: 191 - DNA, 2601 bp, synthetic construct
  misc_feature 1..2601: note = Synthetic
  source 1..2601: mol_type = other DNA
atggctctcgtggattacggcaagcttttcgaggatctgaaccagataagcatgggtgtactggatcgggtagagttttcagaggtgatggtgatccacaggatgtatgtgaggctagctgatctgaatgtggggcagctcgagggagccgagaaagtgaagcgcttctatgtctttagcgacatcgtcgagctcccagtcgtggaatggcggtggccgccgcaaataccaggatcggtgacggtgatcatattgtgtcgtcttcttcaatggccaactgatgggaggcagtcggacaccgagctccacctgacattcatgaagttgcatgccatacaacgagaggaaaatcggtgggagataaccgcagcagatggcatgaactggggagtttacatacacgcagaggaagtacaggttggcgtgctgacaatgtcatggtcttcggtacttagagtttcggcacttcgctctgttataacctccggctttcgcgccgttagtgtgtttgaggtaccgggaagtgtaaggtccacccttggagctactttaaggcccgatcacgccttatatagtacaactatgcaagccacacccaacgcatcgcatattagtgcttttaaccttcgcatagtttccccgtcggcatatcgtgtttgtcctctccaaaatgacacagatacctacttaggtattccagcagacgtggcggcagttcttccagtagacgtggtgactgatcctaacatcttgctgggcatgcagacaacggtacacattgcggagctagtcaaggcatgtcatccgtcacccgatgttgtgagcgctgtaggggagcacctgaactggctcaacaaactcttactcccacttaaggaatcgactcagttgcaaggaagcgagtcgtacaaggagtgccttgcactcttgggtcgtgttcacgctgcgatgaagatggtgagaattggcttagtagtgccccagctgcaatacagaatgtacggtagcctcatcaaccaaatggcccaagtagcacaaaactacgaccgagaattcaagcaattcaaattattcatcatccaaaatcaaatccttggcagctatttgctgcagcagaacagggcatttgctgagagggagctgcagatggagagctttcatgctgctgtcatttctcaaagaagggaggagttggacaatacattcgcaaagatggaccgattgagcgggcaaatggaggcagagagtagtgcaatggagcaagccaaaaaggaaatggacgaaggattgaggcagttccagaataggcaagttgcgaacgccctctttgccgttcttagcgctgtagctcagattgggcttgcattccttacggctggtgcaacggctcctggagctgtggcgtcggcggggcaagctgtgagcatagcaggtcaggcggcgcaaggtctgcgaagggtggtggaaattctagagcagctggaggctgtgatggaggttgtggctgctgtgaaggacctcgtggattcattggaacaggtaggtcagattgtggacgcaccggtgatgccggaattgccctcagaggcggactggtccatttttgtgaacgaggtggaggccgtggcagagggcatgccaacggaagtctcggaggttccggtgtggagggccaagtgcaagaatgtggctgcactgggtcgggagatgagcatcacggcagtacagatgtcggagctgcagtatgacatctgggtgcaaggcatgatgcgggatatggctcgaagccaggcagacaggctggccgcaattcaacccgcggaccttaccaactatttggagatggctacccagatggatatgcggactacgaggatgctgctggggctcctcaacatattgcgcatccagaatgcggcgctcaggtacgagtatcttctaatgcccacggagctcacaacatggccactgggtatggataccgtgggtgacttgctcatcgcgcaggagaatgctgcactgataggattaatgcagctagggccctcatctgatttcacgagcaggcatgtggtgaaagacatacctgtgaacttgctgctcgatggcgaggattgggagtttgagattcctgtgcaagctggcatgtccagcttcccttccagctggtctcgcgtccgtattcggcacctggagatgcactttgtgaaggaggccagcggtattggtggtgagattatccaccagcctaccacccagactgggaccgtttacatccttctgcagggttccactatcttccatgaccgcagaagagaccaggtgttgccttttcaggccgctgctccgctcaactaccattacgcgtaccgcctcgacaccggcgactccactctcacaaacgaaccctctgaacagtttgccaacaagttcatgcagatgacacccttcacccgttggaggcttcgtctgtctgcgtccgcaaaagagaatgcaggattagcctttcccacggctacagcacttgactccactacccagattgtcatcactttccatgttacggccatcagacaaattgactggcggcacgacgaagag

SEQ ID NO: 192 - DNA, 2601 bp, synthetic construct
  misc_feature 1..2601: note = Synthetic
  source 1..2601: mol_type = other DNA
atggctctcgtggattacggcaagcttttcgaggatctgaaccagataagcatgggtgtactggatcgggtagagttttcagaggtgatggtgatccacaggatgtatgtgaggctagctgatctgaatgtggggcagctcgagggagccgagaaagtgaagcgcctcgtcatcttgggcgacatcatcgtggtcccagtcgtggaatggcggtggccgccgcaaataccaggatcggtgacggtgatcatattgtgtcgtcttcttcaatggccaactgatgggaggcagtcggacaccgagctccacctgacattcatgaagttgcatgccatacaacgagaggaaaatcggtgggagataaccgcagcagatggcatgaactggggagtttacatacacgcagaggaagtacaggttggcgtgctgacaatgtcatggtcttcggtacttagagtttcggcacttcgctctgttataacctccggctttcgcgccgttagtgtgtttgaggtaccgggaagtgtaaggtccacccttggagctactttaaggcccgatcacgccttatatagtacaactatgcaagccacacccaacgcatcgcatattagtgcttttaaccttcgcatagtttccccgtcggcatatcgtgtttgtcctctccaaaatgacacagatacctacttaggtattccagcagacgtggcggcagttcttccagtagacgtggtgactgatcctaacatcttgctgggcatgcagacaacggtacacattgcggagctagtcaaggcatgtcatccgtcacccgatgttgtgagcgctgtaggggagcacctgaactggctcaacaaactcttactcccacttaaggaatcgactcagttgcaaggaagcgagtcgtacaaggagtgccttgcactcttgggtcgtgttcacgctgcgatgaagatggtgagaattggcttagtagtgccccagctgcaatacagaatgtacggtagcctcatcaaccaaatggcccaagtagcacaaaactacgaccgagaattcaagcaattcaaattattcatcatccaaaatcaaatccttggcagctatttgctgcagcagaacagggcatttgctgagagggagctgcagatggagagctttcatgctgctgtcatttctcaaagaagggaggagttggacaatacattcgcaaagatggaccgattgagcgggcaaatggaggcagagagtagtgcaatggagcaagccaaaaaggaaatggacgaaggattgaggcagttccagaataggcaagttgcgaacgccctctttgccgttcttagcgctgtagctcagattgggcttgcattccttacggctggtgcaacggctcctggagctgtggcgtcggcggggcaagctgtgagcatagcaggtcaggcggcgcaaggtctgcgaagggtggtggaaattctagagcagctggaggctgtgatggaggttgtggctgctgtgaaggacctcgtggattcattggaacaggtaggtcagattgtggacgcaccggtgatgccggaattgccctcagaggcggactggtccatttttgtgaacgaggtggaggccgtggcagagggcatgccaacggaagtctcggaggttccggtgtggagggccaagtgcaagaatgtggctgcactgggtcgggagatgagcatcacggcagtacagatgtcggagctgcagtatgacatctgggtgcaaggcatgatgcgggatatggctcgaagccaggcagacaggctggccgcaattcaacccgcggaccttaccaactatttggagatggctacccagatggatatgcggactacgaggatgctgctggggctcctcaacatattgcgcatccagaatgcggcgctcaggtacgagtatcttctaatgcccacggagctcacaacatggccactgggtatggataccgtgggtgacttgctcatcgcgcaggagaatgctgcactgataggattaatgcagctagggccctcatctgatttcacgagcaggcatgtggtgaaagacatacctgtgaacttgctgctcgatggcgaggattgggagtttgagattcctgtgcaagctggcatgtccagcttcccttccagctggtctcgcgtccgtattcggcacctggagatgcactttgtgaaggaggccagcggtattggtggtgagattatccaccagcctaccacccagactgggaccgtttacatccttctgcagggttccactatcttccatgaccgcagaagagaccaggtgttgccttttcaggccgctgctccgctcaactaccattacgcgtaccgcctcgacaccggcgactccactctcacaaacgaaccctctgaacagtttgccaacaagttcatgcagatgacacccttcacccgttggaggcttcgtctgtctgcgtccgcaaaagagaatgcaggattagcctttcccacggctacagcacttgactccactacccagattgtcatcactttccatgttacggccatcagacaaattgactggcggcacgacgaagag

SEQ ID NO: 193 - DNA, 2601 bp, synthetic construct
  misc_feature 1..2601: note = Synthetic
  source 1..2601: mol_type = other DNA
atggctctcgtggattacggcaagcttttcgaggatctgaaccagataagcatgggtgtactggatcgggtagagttttcagaggtgatggtgatccacaggatgtatgtgaggctagctgatctgaatgtggggcagctcgagggagccgagaaagtgaagcgcttgtatatttttgccgacattatcgagctaccagtcgtggaatggcggtggccgccgcaaataccaggatcggtgacggtgatcatattgtgtcgtcttcttcaatggccaactgatgggaggcagtcggacaccgagctccacctgacattcatgaagttgcatgccatacaacgagaggaaaatcggtgggagataaccgcagcagatggcatgaactggggagtttacatacacgcagaggaagtacaggttggcgtgctgacaatgtcatggtcttcggtacttagagtttcggcacttcgctctgttataacctccggctttcgcgccgttagtgtgtttgaggtaccgggaagtgtaaggtccacccttggagctactttaaggcccgatcacgccttatatagtacaactatgcaagccacacccaacgcatcgcatattagtgcttttaaccttcgcatagtttccccgtcggcatatcgtgtttgtcctctccaaaatgacacagatacctacttaggtattccagcagacgtggcggcagttcttccagtagacgtggtgactgatcctaacatcttgctgggcatgcagacaacggtacacattgcggagctagtcaaggcatgtcatccgtcacccgatgttgtgagcgctgtaggggagcacctgaactggctcaacaaactcttactcccacttaaggaatcgactcagttgcaaggaagcgagtcgtacaaggagtgccttgcactcttgggtcgtgttcacgctgcgatgaagatggtgagaattggcttagtagtgccccagctgcaatacagaatgtacggtagcctcatcaaccaaatggcccaagtagcacaaaactacgaccgagaattcaagcaattcaaattattcatcatccaaaatcaaatccttggcagctatttgctgcagcagaacagggcatttgctgagagggagctgcagatggagagctttcatgctgctgtcatttctcaaagaagggaggagttggacaatacattcgcaaagatggaccgattgagcgggcaaatggaggcagagagtagtgcaatggagcaagccaaaaaggaaatggacgaaggattgaggcagttccagaataggcaagttgcgaacgccctctttgccgttcttagcgctgtagctcagattgggcttgcattccttacggctggtgcaacggctcctggagctgtggcgtcggcggggcaagctgtgagcatagcaggtcaggcggcgcaaggtctgcgaagggtggtggaaattctagagcagctggaggctgtgatggaggttgtggctgctgtgaaggacctcgtggattcattggaacaggtaggtcagattgtggacgcaccggtgatgccggaattgccctcagaggcggactggtccatttttgtgaacgaggtggaggccgtggcagagggcatgccaacggaagtctcggaggttccggtgtggagggccaagtgcaagaatgtggctgcactgggtcgggagatgagcatcacggcagtacagatgtcggagctgcagtatgacatctgggtgcaaggcatgatgcgggatatggctcgaagccaggcagacaggctggccgcaattcaacccgcggaccttaccaactatttggagatggctacccagatggatatgcggactacgaggatgctgctggggctcctcaacatattgcgcatccagaatgcggcgctcaggtacgagtatcttctaatgcccacggagctcacaacatggccactgggtatggataccgtgggtgacttgctcatcgcgcaggagaatgctgcactgataggattaatgcagctagggccctcatctgatttcacgagcaggcatgtggtgaaagacatacctgtgaacttgctgctcgatggcgaggattgggagtttgagattcctgtgcaagctggcatgtccagcttcccttccagctggtctcgcgtccgtattcggcacctggagatgcactttgtgaaggaggccagcggtattggtggtgagattatccaccagcctaccacccagactgggaccgtttacatccttctgcagggttccactatcttccatgaccgcagaagagaccaggtgttgccttttcaggccgctgctccgctcaactaccattacgcgtaccgcctcgacaccggcgactccactctcacaaacgaaccctctgaacagtttgccaacaagttcatgcagatgacacccttcacccgttggaggcttcgtctgtctgcgtccgcaaaagagaatgcaggattagcctttcccacggctacagcacttgactccactacccagattgtcatcactttccatgttacggccatcagacaaattgactggcggcacgacgaagag

SEQ ID NO: 194 - DNA, 2601 bp, synthetic construct
  misc_feature 1..2601: note = Synthetic
  source 1..2601: mol_type = other DNA
atggctctcgtggattacggcaagcttttcgaggatctgaaccagataagcatgggtgtactggatcgggtagagttttcagaggtgatggtgatccacaggatgtatgtgaggctagctgatctgaatgtggggcagctcgagggagccgagaaagtgaagcgcttgtatattttttgcgacattatcgtgctaccagtcgtggaatggcggtggccgccgcaaataccaggatcggtgacggtgatcatattgtgtcgtcttcttcaatggccaactgatgggaggcagtcggacaccgagctccacctgacattcatgaagttgcatgccatacaacgagaggaaaatcggtgggagataaccgcagcagatggcatgaactggggagtttacatacacgcagaggaagtacaggttggcgtgctgacaatgtcatggtcttcggtacttagagtttcggcacttcgctctgttataacctccggctttcgcgccgttagtgtgtttgaggtaccgggaagtgtaaggtccacccttggagctactttaaggcccgatcacgccttatatagtacaactatgcaagccacacccaacgcatcgcatattagtgcttttaaccttcgcatagtttccccgtcggcatatcgtgtttgtcctctccaaaatgacacagatacctacttaggtattccagcagacgtggcggcagttcttccagtagacgtggtgactgatcctaacatcttgctgggcatgcagacaacggtacacattgcggagctagtcaaggcatgtcatccgtcacccgatgttgtgagcgctgtaggggagcacctgaactggctcaacaaactcttactcccacttaaggaatcgactcagttgcaaggaagcgagtcgtacaaggagtgccttgcactcttgggtcgtgttcacgctgcgatgaagatggtgagaattggcttagtagtgccccagctgcaatacagaatgtacggtagcctcatcaaccaaatggcccaagtagcacaaaactacgaccgagaattcaagcaattcaaattattcatcatccaaaatcaaatccttggcagctatttgctgcagcagaacagggcatttgctgagagggagctgcagatggagagctttcatgctgctgtcatttctcaaagaagggaggagttggacaatacattcgcaaagatggaccgattgagcgggcaaatggaggcagagagtagtgcaatggagcaagccaaaaaggaaatggacgaaggattgaggcagttccagaataggcaagttgcgaacgccctctttgccgttcttagcgctgtagctcagattgggcttgcattccttacggctggtgcaacggctcctggagctgtggcgtcggcggggcaagctgtgagcatagcaggtcaggcggcgcaaggtctgcgaagggtggtggaaattctagagcagctggaggctgtgatggaggttgtggctgctgtgaaggacctcgtggattcattggaacaggtaggtcagattgtggacgcaccggtgatgccggaattgccctcagaggcggactggtccatttttgtgaacgaggtggaggccgtggcagagggcatgccaacggaagtctcggaggttccggtgtggagggccaagtgcaagaatgtggctgcactgggtcgggagatgagcatcacggcagtacagatgtcggagctgcagtatgacatctgggtgcaaggcatgatgcgggatatggctcgaagccaggcagacaggctggccgcaattcaacccgcggaccttaccaactatttggagatggctacccagatggatatgcggactacgaggatgctgctggggctcctcaacatattgcgcatccagaatgcggcgctcaggtacgagtatcttctaatgcccacggagctcacaacatggccactgggtatggataccgtgggtgacttgctcatcgcgcaggagaatgctgcactgataggattaatgcagctagggccctcatctgatttcacgagcaggcatgtggtgaaagacatacctgtgaacttgctgctcgatggcgaggattgggagtttgagattcctgtgcaagctggcatgtccagcttcccttccagctggtctcgcgtccgtattcggcacctggagatgcactttgtgaaggaggccagcggtattggtggtgagattatccaccagcctaccacccagactgggaccgtttacatccttctgcagggttccactatcttccatgaccgcagaagagaccaggtgttgccttttcaggccgctgctccgctcaactaccattacgcgtaccgcctcgacaccggcgactccactctcacaaacgaaccctctgaacagtttgccaacaagttcatgcagatgacacccttcacccgttggaggcttcgtctgtctgcgtccgcaaaagagaatgcaggattagcctttcccacggctacagcacttgactccactacccagattgtcatcactttccatgttacggccatcagacaaattgactggcggcacgacgaagag

SEQ ID NO: 195 - DNA, 2601 bp, synthetic construct
  misc_feature 1..2601: note = Synthetic
  source 1..2601: mol_type = other DNA
atggctctcgtggattacggcaagcttttcgaggatctgaaccagataagcatgggtgtactggatcgggtagagttttcagaggtgatggtgatccacaggatgtatgtgaggctagctgatctgaatgtggggcagctcgagggagccgagaaagtgaagcgcttgtatattttttgcgacattgtcgagctaccagtcgtggaatggcggtggccgccgcaaataccaggatcggtgacggtgatcatattgtgtcgtcttcttcaatggccaactgatgggaggcagtcggacaccgagctccacctgacattcatgaagttgcatgccatacaacgagaggaaaatcggtgggagataaccgcagcagatggcatgaactggggagtttacatacacgcagaggaagtacaggttggcgtgctgacaatgtcatggtcttcggtacttagagtttcggcacttcgctctgttataacctccggctttcgcgccgttagtgtgtttgaggtaccgggaagtgtaaggtccacccttggagctactttaaggcccgatcacgccttatatagtacaactatgcaagccacacccaacgcatcgcatattagtgcttttaaccttcgcatagtttccccgtcggcatatcgtgtttgtcctctccaaaatgacacagatacctacttaggtattccagcagacgtggcggcagttcttccagtagacgtggtgactgatcctaacatcttgctgggcatgcagacaacggtacacattgcggagctagtcaaggcatgtcatccgtcacccgatgttgtgagcgctgtaggggagcacctgaactggctcaacaaactcttactcccacttaaggaatcgactcagttgcaaggaagcgagtcgtacaaggagtgccttgcactcttgggtcgtgttcacgctgcgatgaagatggtgagaattggcttagtagtgccccagctgcaatacagaatgtacggtagcctcatcaaccaaatggcccaagtagcacaaaactacgaccgagaattcaagcaattcaaattattcatcatccaaaatcaaatccttggcagctatttgctgcagcagaacagggcatttgctgagagggagctgcagatggagagctttcatgctgctgtcatttctcaaagaagggaggagttggacaatacattcgcaaagatggaccgattgagcgggcaaatggaggcagagagtagtgcaatggagcaagccaaaaaggaaatggacgaaggattgaggcagttccagaataggcaagttgcgaacgccctctttgccgttcttagcgctgtagctcagattgggcttgcattccttacggctggtgcaacggctcctggagctgtggcgtcggcggggcaagctgtgagcatagcaggtcaggcggcgcaaggtctgcgaagggtggtggaaattctagagcagctggaggctgtgatggaggttgtggctgctgtgaaggacctcgtggattcattggaacaggtaggtcagattgtggacgcaccggtgatgccggaattgccctcagaggcggactggtccatttttgtgaacgaggtggaggccgtggcagagggcatgccaacggaagtctcggaggttccggtgtggagggccaagtgcaagaatgtggctgcactgggtcgggagatgagcatcacggcagtacagatgtcggagctgcagtatgacatctgggtgcaaggcatgatgcgggatatggctcgaagccaggcagacaggctggccgcaattcaacccgcggaccttaccaactatttggagatggctacccagatggatatgcggactacgaggatgctgctggggctcctcaacatattgcgcatccagaatgcggcgctcaggtacgagtatcttctaatgcccacggagctcacaacatggccactgggtatggataccgtgggtgacttgctcatcgcgcaggagaatgctgcactgataggattaatgcagctagggccctcatctgatttcacgagcaggcatgtggtgaaagacatacctgtgaacttgctgctcgatggcgaggattgggagtttgagattcctgtgcaagctggcatgtccagcttcccttccagctggtctcgcgtccgtattcggcacctggagatgcactttgtgaaggaggccagcggtattggtggtgagattatccaccagcctaccacccagactgggaccgtttacatccttctgcagggttccactatcttccatgaccgcagaagagaccaggtgttgccttttcaggccgctgctccgctcaactaccattacgcgtaccgcctcgacaccggcgactccactctcacaaacgaaccctctgaacagtttgccaacaagttcatgcagatgacacccttcacccgttggaggcttcgtctgtctgcgtccgcaaaagagaatgcaggattagcctttcccacggctacagcacttgactccactacccagattgtcatcactttccatgttacggccatcagacaaattgactggcggcacgacgaagag

SEQ ID NO: 196 - DNA, 2601 bp, synthetic construct
  misc_feature 1..2601: note = Synthetic
  source 1..2601: mol_type = other DNA
atggctctcgtggattacggcaagcttttcgaggatctgaaccagataagcatgggtgtactggatcgggtagagttttcagaggtgatggtgatccacaggatgtatgtgaggctagctgatctgaatgtggggcagctcgagggagccgagaaagtgaagcgcttgtatatttttggcgacattatcgagctaccagtcgtggaatggcggtggccggcgcaaataccaggatcggtgacggtgatcatattgtgtcgtcttcttcaatggccaactgatgggaggcagtcggacaccgagctccacctgacattcatgaagttgcatgccatacaacgagaggaaaatcggtgggagataaccgcagcagatggcatgaactggggagtttacatacacgcagaggaagtacaggttggcgtgctgacaatgtcatggtcttcggtacttagagtttcggcacttcgctctgttataacctccggctttcgcgccgttagtgtgtttgaggtaccgggaagtgtaaggtccacccttggagctactttaaggcccgatcacgccttatatagtacaactatgcaagccacacccaacgcatcgcatattagtgcttttaaccttcgcatagtttccccgtcggcatatcgtgtttgtcctctccaaaatgacacagatacctacttaggtattccagcagacgtggcggcagttcttccagtagacgtggtgactgatcctaacatcttgctgggcatgcagacaacggtacacattgcggagctagtcaaggcatgtcatccgtcacccgatgttgtgagcgctgtaggggagcacctgaactggctcaacaaactcttactcccacttaaggaatcgactcagttgcaaggaagcgagtcgtacaaggagtgccttgcactcttgggtcgtgttcacgctgcgatgaagatggtgagaattggcttagtagtgccccagctgcaatacagaatgtacggtagcctcatcaaccaaatggcccaagtagcacaaaactacgaccgagaattcaagcaattcaaattattcatcatccaaaatcaaatccttggcagctatttgctgcagcagaacagggcatttgctgagagggagctgcagatggagagctttcatgctgctgtcatttctcaaagaagggaggagttggacaatacattcgcaaagatggaccgattgagcgggcaaatggaggcagagagtagtgcaatggagcaagccaaaaaggaaatggacgaaggattgaggcagttccagaataggcaagttgcgaacgccctctttgccgttcttagcgctgtagctcagattgggcttgcattccttacggctggtgcaacggctcctggagctgtggcgtcggcggggcaagctgtgagcatagcaggtcaggcggcgcaaggtctgcgaagggtggtggaaattctagagcagctggaggctgtgatggaggttgtggctgctgtgaaggacctcgtggattcattggaacaggtaggtcagattgtggacgcaccggtgatgccggaattgccctcagaggcggactggtccatttttgtgaacgaggtggaggccgtggcagagggcatgccaacggaagtctcggaggttccggtgtggagggccaagtgcaagaatgtggctgcactgggtcgggagatgagcatcacggcagtacagatgtcggagctgcagtatgacatctgggtgcaaggcatgatgcgggatatggctcgaagccaggcagacaggctggccgcaattcaacccgcggaccttaccaactatttggagatggctacccagatggatatgcggactacgaggatgctgctggggctcctcaacatattgcgcatccagaatgcggcgctcaggtacgagtatcttctaatgcccacggagctcacaacatggccactgggtatggataccgtgggtgacttgctcatcgcgcaggagaatgctgcactgataggattaatgcagctagggccctcatctgatttcacgagcaggcatgtggtgaaagacatacctgtgaacttgctgctcgatggcgaggattgggagtttgagattcctgtgcaagctggcatgtccagcttcccttccagctggtctcgcgtccgtattcggcacctggagatgcactttgtgaaggaggccagcggtattggtggtgagattatccaccagcctaccacccagactgggaccgtttacatccttctgcagggttccactatcttccatgaccgcagaagagaccaggtgttgccttttcaggccgctgctccgctcaactaccattacgcgtaccgcctcgacaccggcgactccactctcacaaacgaaccctctgaacagtttgccaacaagttcatgcagatgacacccttcacccgttggaggcttcgtctgtctgcgtccgcaaaagagaatgcaggattagcctttcccacggctacagcacttgactccactacccagattgtcatcactttccatgttacggccatcagacaaattgactggcggcacgacgaagag

SEQ ID NO: 197 - DNA, 2601 bp, synthetic construct
  misc_feature 1..2601: note = Synthetic
  source 1..2601: mol_type = other DNA
atggctctcgtggattacggcaagcttttcgaggatctgaaccagataagcatgggtgtactggatcgggtagagttttcagaggtgatggtgatccacaggatgtatgtgaggctagctgatctgaatgtggggcagctcgagggagccgagaaagtgaagcgcttgtatatttttggcgacgttatcgagctaccagtcgtggaatggcggtggccgccgcaaataccaggatcggtgacggtgatcatattgtgtcgtcttcttcaatggccaactgatgggaggcagtcggacaccgagctccacctgacattcatgaagttgcatgccatacaacgagaggaaaatcggtgggagataaccgcagcagatggcatgaactggggagtttacatacacgcagaggaagtacaggttggcgtgctgacaatgtcatggtcttcggtacttagagtttcggcacttcgctctgttataacctccggctttcgcgccgttagtgtgtttgaggtaccgggaagtgtaaggtccacccttggagctactttaaggcccgatcacgccttatatagtacaactatgcaagccacacccaacgcatcgcatattagtgcttttaaccttcgcatagtttccccgtcggcatatcgtgtttgtcctctccaaaatgacacagatacctacttaggtattccagcagacgtggcggcagttcttccagtagacgtggtgactgatcctaacatcttgctgggcatgcagacaacggtacacattgcggagctagtcaaggcatgtcatccgtcacccgatgttgtgagcgctgtaggggagcacctgaactggctcaacaaactcttactcccacttaaggaatcgactcagttgcaaggaagcgagtcgtacaaggagtgccttgcactcttgggtcgtgttcacgctgcgatgaagatggtgagaattggcttagtagtgccccagctgcaatacagaatgtacggtagcctcatcaaccaaatggcccaagtagcacaaaactacgaccgagaattcaagcaattcaaattattcatcatccaaaatcaaatccttggcagctatttgctgcagcagaacagggcatttgctgagagggagctgcagatggagagctttcatgctgctgtcatttctcaaagaagggaggagttggacaatacattcgcaaagatggaccgattgagcgggcaaatggaggcagagagtagtgcaatggagcaagccaaaaaggaaatggacgaaggattgaggcagttccagaataggcaagttgcgaacgccctctttgccgttcttagcgctgtagctcagattgggcttgcattccttacggctggtgcaacggctcctggagctgtggcgtcggcggggcaagctgtgagcatagcaggtcaggcggcgcaaggtctgcgaagggtggtggaaattctagagcagctggaggctgtgatggaggttgtggctgctgtgaaggacctcgtggattcattggaacaggtaggtcagattgtggacgcaccggtgatgccggaattgccctcagaggcggactggtccatttttgtgaacgaggtggaggccgtggcagagggcatgccaacggaagtctcggaggttccggtgtggagggccaagtgcaagaatgtggctgcactgggtcgggagatgagcatcacggcagtacagatgtcggagctgcagtatgacatctgggtgcaaggcatgatgcgggatatggctcgaagccaggcagacaggctggccgcaattcaacccgcggaccttaccaactatttggagatggctacccagatggatatgcggactacgaggatgctgctggggctcctcaacatattgcgcatccagaatgcggcgctcaggtacgagtatcttctaatgcccacggagctcacaacatggccactgggtatggataccgtgggtgacttgctcatcgcgcaggagaatgctgcactgataggattaatgcagctagggccctcatctgatttcacgagcaggcatgtggtgaaagacatacctgtgaacttgctgctcgatggcgaggattgggagtttgagattcctgtgcaagctggcatgtccagcttcccttccagctggtctcgcgtccgtattcggcacctggagatgcactttgtgaaggaggccagcggtattggtggtgagattatccaccagcctaccacccagactgggaccgtttacatccttctgcagggttccactatcttccatgaccgcagaagagaccaggtgttgccttttcaggccgctgctccgctcaactaccattacgcgtaccgcctcgacaccggcgactccactctcacaaacgaaccctctgaacagtttgccaacaagttcatgcagatgacacccttcacccgttggaggcttcgtctgtctgcgtccgcaaaagagaatgcaggattagcctttcccacggctacagcacttgactccactacccagattgtcatcactttccatgttacggccatcagacaaattgactggcggcacgacgaagag

SEQ ID NO: 198 - DNA, 2601 bp, synthetic construct
  misc_feature 1..2601: note = Synthetic
  source 1..2601: mol_type = other DNA
atggctctcgtggattacggcaagcttttcgaggatctgaaccagataagcatgggtgtactggatcgggtagagttttcagaggtgatggtgatccacaggatgtatgtgaggctagctgatctgaatgtggggcagctcgagggagccgagaaagtgaagcgcttgtatattttttccgacattatcgtgctaccagtcgtggaatggcggtggccgccgcaaataccaggatcggtgacggtgatcatattgtgtcgtcttcttcaatggccaactgatgggaggcagtcggacaccgagctccacctgacattcatgaagttgcatgccatacaacgagaggaaaatcggtgggagataaccgcagcagatggcatgaactggggagtttacatacacgcagaggaagtacaggttggcgtgctgacaatgtcatggtcttcggtacttagagtttcggcacttcgctctgttataacctccggctttcgcgccgttagtgtgtttgaggtaccgggaagtgtaaggtccacccttggagctactttaaggcccgatcacgccttatatagtacaactatgcaagccacacccaacgcatcgcatattagtgcttttaaccttcgcatagtttccccgtcggcatatcgtgtttgtcctctccaaaatgacacagatacctacttaggtattccagcagacgtggcggcagttcttccagtagacgtggtgactgatcctaacatcttgctgggcatgcagacaacggtacacattgcggagctagtcaaggcatgtcatccgtcacccgatgttgtgagcgctgtaggggagcacctgaactggctcaacaaactcttactcccacttaaggaatcgactcagttgcaaggaagcgagtcgtacaaggagtgccttgcactcttgggtcgtgttcacgctgcgatgaagatggtgagaattggcttagtagtgccccagctgcaatacagaatgtacggtagcctcatcaaccaaatggcccaagtagcacaaaactacgaccgagaattcaagcaattcaaattattcatcatccaaaatcaaatccttggcagctatttgctgcagcagaacagggcatttgctgagagggagctgcagatggagagctttcatgctgctgtcatttctcaaagaagggaggagttggacaatacattcgcaaagatggaccgattgagcgggcaaatggaggcagagagtagtgcaatggagcaagccaaaaaggaaatggacgaaggattgaggcagttccagaataggcaagttgcgaacgccctctttgccgttcttagcgctgtagctcagattgggcttgcattccttacggctggtgcaacggctcctggagctgtggcgtcggcggggcaagctgtgagcatagcaggtcaggcggcgcaaggtctgcgaagggtggtggaaattctagagcagctggaggctgtgatggaggttgtggctgctgtgaaggacctcgtggattcattggaacaggtaggtcagattgtggacgcaccggtgatgccggaattgccctcagaggcggactggtccatttttgtgaacgaggtggaggccgtggcagagggcatgccaacggaagtctcggaggttccggtgtggagggccaagtgcaagaatgtggctgcactgggtcgggagatgagcatcacggcagtacagatgtcggagctgcagtatgacatctgggtgcaaggcatgatgcgggatatggctcgaagccaggcagacaggctggccgcaattcaacccgcggaccttaccaactatttggagatggctacccagatggatatgcggactacgaggatgctgctggggctcctcaacatattgcgcatccagaatgcggcgctcaggtacgagtatcttctaatgcccacggagctcacaacatggccactgggtatggataccgtgggtgacttgctcatcgcgcaggagaatgctgcactgataggattaatgcagctagggccctcatctgatttcacgagcaggcatgtggtgaaagacatacctgtgaacttgctgctcgatggcgaggattgggagtttgagattcctgtgcaagctggcatgtccagcttcccttccagctggtctcgcgtccgtattcggcacctggagatgcactttgtgaaggaggccagcggtattggtggtgagattatccaccagcctaccacccagactgggaccgtttacatccttctgcagggttccactatcttccatgaccgcagaagagaccaggtgttgccttttcaggccgctgctccgctcaactaccattacgcgtaccgcctcgacaccggcgactccactctcacaaacgaaccctctgaacagtttgccaacaagttcatgcagatgacacccttcacccgttggaggcttcgtctgtctgcgtccgcaaaagagaatgcaggattagcctttcccacggctacagcacttgactccactacccagattgtcatcactttccatgttacggccatcagacaaattgactggcggcacgacgaagag

SEQ ID NO: 199 - DNA, 2601 bp, synthetic construct
  misc_feature 1..2601: note = Synthetic
  source 1..2601: mol_type = other DNA
atggctctcgtggattacggcaagcttttcgaggatctgaaccagataagcatgggtgtactggatcgggtagagttttcagaggtgatggtgatccacaggatgtatgtgaggctagctgatctgaatgtggggcagctcgagggagccgagaaagtgaagcggttgtatatttttagcgacattctcgagctaccagtcgtggaatggcggtggccgccgcaaataccgggatcggtgacggtgatcatattgtgtcgtcttcttcaatggccaactgatgggaggcagtcggacaccgagctccacctgacattcatgaagttgcatgccatacaacgagaggaaaatcggtgggagataaccgcagcagatggcatgaactggggagtttacatacacgcagaggaagtacaggttggcgtgctgacaatgtcatggtcttcggtacttagagtttcggcacttcgctctgttataacctccggctttcgcgccgttagtgtgtttgaggtaccgggaagtgtaaggtccacccttggagctactttaaggcccgatcacgccttatatagtacaactatgcaagccacacccaacgcatcgcatattagtgcttttaaccttcgcatagtttccccgtcggcatatcgtgtttgtcctctccaaaatgacacagatacctacttaggtattccagcagacgtggcggcagttcttccagtagacgtggtgactgatcctaacatcttgctgggcatgcagacaacggtacacattgcggagctagtcaaggcatgtcatccgtcacccgatgttgtgagcgctgtaggggagcacctgaactggctcaacaaactcttactcccacttaaggaatcgactcagttgcaaggaagcgagtcgtacaaggagtgccttgcactcttgggtcgtgttcacgctgcgatgaagatggtgagaattggcttagtagtgccccagctgcaatacagaatgtacggtagcctcatcaaccaaatggcccaagtagcacaaaactacgaccgagaattcaagcaattcaaattattcatcatccaaaatcaaatccttggcagctatttgctgcagcagaacagggcatttgctgagagggagctgcagatggagagctttcatgctgctgtcatttctcaaagaagggaggagttggacaatacattcgcaaagatggaccgattgagcgggcaaatggaggcagagagtagtgcaatggagcaagccaaaaaggaaatggacgaaggattgaggcagttccagaataggcaagttgcgaacgccctctttgccgttcttagcgctgtagctcagattgggcttgcattccttacggctggtgcaacggctcctggagctgtggcgtcggcggggcaagctgtgagcatagcaggtcaggcggcgcaaggtctgcgaagggtggtggaaattctagagcagctggaggctgtgatggaggttgtggctgctgtgaaggacctcgtggattcattggaacaggtaggtcagattgtggacgcaccggtgatgccggaattgccctcagaggcggactggtccatttttgtgaacgaggtggaggccgtggcagagggcatgccaacggaagtctcggaggttccggtgtggagggccaagtgcaagaatgtggctgcactgggtcgggagatgagcatcacggcagtacagatgtcggagctgcagtatgacatctgggtgcaaggcatgatgcgggatatggctcgaagccaggcagacaggctggccgcaattcaacccgcggaccttaccaactatttggagatggctacccagatggatatgcggactacgaggatgctgctggggctcctcaacatattgcgcatccagaatgcggcgctcaggtacgagtatcttctaatgcccacggagctcacaacatggccactgggtatggataccgtgggtgacttgctcatcgcgcaggagaatgctgcactgataggattaatgcagctagggccctcatctgatttcacgagcaggcatgtggtgaaagacatacctgtgaacttgctgctcgatggcgaggattgggagtttgagattcctgtgcaagctggcatgtccagcttcccttccagctggtctcgcgtccgtattcggcacctggagatgcactttgtgaaggaggccagcggtattggtggtgagattatccaccagcctaccacccagactgggaccgtttacatccttctgcagggttccactatcttccatgaccgcagaagagaccaggtgttgccttttcaggccgctgctccgctcaactaccattacgcgtaccgcctcgacaccggcgactccactctcacaaacgaaccctctgaacagtttgccaacaagttcatgcagatgacacccttcacccgttggaggcttcgtctgtctgcgtccgcaaaagagaatgcaggattagcctttcccacggctacagcacttgactccactacccagattgtcatcactttccatgttacggccatcagacaaattgactggcggcacgacgaagag

SEQ ID NO: 200 - DNA, 2601 bp, synthetic construct
  misc_feature 1..2601: note = Synthetic
  source 1..2601: mol_type = other DNA
atggctctcgtggattacggcaagcttttcgaggatctgaaccagataagcatgggtgtactggatcgggtagagttttcagaggtgatggtgatccacaggatgtatgtgaggctagctgatctgaatgtggggcagctagagggagccgagaaagtgaagcgcttgtatatttttagcgacgttatcgtgctaccagtcgtggaatggcggtggccgccgcaaataccaggatcggtgacggtgatcatattgtgtcgtcttcttcaatggccaactgatgggaggcagtcggacaccgagctccacctgacattcatgaagttgcatgccatacaacgagaggaaaatcggtgggagataaccgcagcagatggcatgaactggggagtttacatacacgcagaggaagtacaggttggcgtgctgacaatgtcatggtcttcggtacttagagtttcggcacttcgctctgttataacctccggctttcgcgccgttagtgtgtttgaggtaccgggaagtgtaaggtccacccttggagctactttaaggcccgatcacgccttatatagtacaactatgcaagccacacccaacgcatcgcatattagtgcttttaaccttcgcatagtttccccgtcggcatatcgtgtttgtcctctccaaaatgacacagatacctacttaggtattccagcagacgtggcggcagttcttccagtagacgtggtgactgatcctaacatcttgctgggcatgcagacaacggtacacattgcggagctagtcaaggcatgtcatccgtcacccgatgttgtgagcgctgtaggggagcacctgaactggctcaacaaactcttactcccacttaaggaatcgactcagttgcaaggaagcgagtcgtacaaggagtgccttgcactcttgggtcgtgttcacgctgcgatgaagatggtgagaattggcttagtagtgccccagctgcaatacagaatgtacggtagcctcatcaaccaaatggcccaagtagcacaaaactacgaccgagaattcaagcaattcaaattattcatcatccaaaatcaaatccttggcagctatttgctgcagcagaacagggcatttgctgagagggagctgcagatggagagctttcatgctgctgtcatttctcaaagaagggaggagttggacaatacattcgcaaagatggaccgattgagcgggcaaatggaggcagagagtagtgcaatggagcaagccaaaaaggaaatggacgaaggattgaggcagttccagaataggcaagttgcgaacgccctctttgccgttcttagcgctgtagctcagattgggcttgcattccttacggctggtgcaacggctcctggagctgtggcgtcggcggggcaagctgtgagcatagcaggtcaggcggcgcaaggtctgcgaagggtggtggaaattctagagcagctggaggctgtgatggaggttgtggctgctgtgaaggacctcgtggattcattggaacaggtaggtcagattgtggacgcaccggtgatgccggaattgccctcagaggcggactggtccatttttgtgaacgaggtggaggccgtggcagagggcatgccaacggaagtctcggaggttccggtgtggagggccaagtgcaagaatgtggctgcactgggtcgggagatgagcatcacggcagtacagatgtcggagctgcagtatgacatctgggtgcaaggcatgatgcgggatatggctcgaagccaggcagacaggctggccgcaattcaacccgcggaccttaccaactatttggagatggctacccagatggatatgcggactacgaggatgctgctggggctcctcaacatattgcgcatccagaatgcggcgctcaggtacgagtatcttctaatgcccacggagctcacaacatggccactgggtatggataccgtgggtgacttgctcatcgcgcaggagaatgctgcactgataggattaatgcagctagggccctcatctgatttcacgagcaggcatgtggtgaaagacatacctgtgaacttgctgctcgatggcgaggattgggagtttgagattcctgtgcaagctggcatgtccagcttcccttccagctggtctcgcgtccgtattcggcacctggagatgcactttgtgaaggaggccagcggtattggtggtgagattatccaccagcctaccacccagactgggaccgtttacatccttctgcagggttccactatcttccatgaccgcagaagagaccaggtgttgccttttcaggccgctgctccgctcaactaccattacgcgtaccgcctcgacaccggcgactccactctcacaaacgaaccctctgaacagtttgccaacaagttcatgcagatgacacccttcacccgttggaggcttcgtctgtctgcgtccgcaaaagagaatgcaggattagcctttcccacggctacagcacttgactccactacccagattgtcatcactttccatgttacggccatcagacaaattgactggcggcacgacgaagag

SEQ ID NO: 201 - DNA, 2601 bp, synthetic construct
  misc_feature 1..2601: note = Synthetic
  source 1..2601: mol_type = other DNA
atggctctcgtggattacggcaagcttttcgaggatctgaaccagataagcatgggtgtactggatcgggtagagttttcagaggtgatggtgatccacaggatgtatgtgaggctagctgatctgaatgtggggcagctcgagggagccgagaaagtgaagcgcttgtatatttttaccgacgttatcgagctaccagtcgtggaatggcggtggccgccgcaaataccaggatcggtgacggtgatcatattgtgtcgtcttcttcaatggccaactgatgggaggcagtcggacaccgagctccacctgacattcatgaagttgcatgccatacaacgagaggaaaatcggtgggagataaccgcagcagatggcatgaactggggagtttacatacacgcagaggaagtacaggttggcgtgctgacaatgtcatggtcttcggtacttagagtttcggcacttcgctctgttataacctccggctttcgcgccgttagtgtgtttgaggtaccgggaagtgtaaggtccacccttggagctactttaaggcccgatcacgccttatatagtacaactatgcaagccacacccaacgcatcgcatattagtgcttttaaccttcgcatagtttccccgtcggcatatcgtgtttgtcctctccaaaatgacacagatacctacttaggtattccagcagacgtggcggcagttcttccagtagacgtggtgactgatcctaacatcttgctgggcatgcagacaacggtacacattgcggagctagtcaaggcatgtcatccgtcacccgatgttgtgagcgctgtaggggagcacctgaactggctcaacaaactcttactcccacttaaggaatcgactcagttgcaaggaagcgagtcgtacaaggagtgccttgcactcttgggtcgtgttcacgctgcgatgaagatggtgagaattggcttagtagtgccccagctgcaatacagaatgtacggtagcctcatcaaccaaatggcccaagtagcacaaaactacgaccgagaattcaagcaattcaaattattcatcatccaaaatcaaatccttggcagctatttgctgcagcagaacagggcatttgctgagagggagctgcagatggagagctttcatgctgctgtcatttctcaaagaagggaggagttggacaatacattcgcaaagatggaccgattgagcgggcaaatggaggcagagagtagtgcaatggagcaagccaaaaaggaaatggacgaaggattgaggcagttccagaataggcaagttgcgaacgccctctttgccgttcttagcgctgtagctcagattgggcttgcattccttacggctggtgcaacggctcctggagctgtggcgtcggcggggcaagctgtgagcatagcaggtcaggcggcgcaaggtctgcgaagggtggtggaaattctagagcagctggaggctgtgatggaggttgtggctgctgtgaaggacctcgtggattcattggaacaggtaggtcagattgtggacgcaccggtgatgccggaattgccctcagaggcggactggtccatttttgtgaacgaggtggaggccgtggcagagggcatgccaacggaagtctcggaggttccggtgtggagggccaagtgcaagaatgtggctgcactgggtcgggagatgagcatcacggcagtacagatgtcggagctgcagtatgacatctgggtgcaaggcatgatgcgggatatggctcgaagccaggcagacaggctggccgcaattcaacccgcggaccttaccaactatttggagatggctacccagatggatatgcggactacgaggatgctgctggggctcctcaacatattgcgcatccagaatgcggcgctcaggtacgagtatcttctaatgcccacggagctcacaacatggccactgggtatggataccgtgggtgacttgctcatcgcgcaggagaatgctgcactgataggattaatgcagctagggccctcatctgatttcacgagcaggcatgtggtgaaagacatacctgtgaacttgctgctcgatggcgaggattgggagtttgagattcctgtgcaagctggcatgtccagcttcccttccagctggtctcgcgtccgtattcggcacctggagatgcactttgtgaaggaggccagcggtattggtggtgagattatccaccagcctaccacccagactgggaccgtttacatccttctgcagggttccactatcttccatgaccgcagaagagaccaggtgttgccttttcaggccgctgctccgctcaactaccattacgcgtaccgcctcgacaccggcgactccactctcacaaacgaaccctctgaacagtttgccaacaagttcatgcagatgacacccttcacccgttggaggcttcgtctgtctgcgtccgcaaaagagaatgcaggattagcctttcccacggctacagcacttgactccactacccagattgtcatcactttccatgttacggccatcagacaaattgactggcggcacgacgaagag

SEQ ID NO: 202 - DNA, 2601 bp, synthetic construct
  misc_feature 1..2601: note = Synthetic
  source 1..2601: mol_type = other DNA
atggctctcgtggattacggcaagcttttcgaggatctgaaccagataagcatgggtgtactggatcgggtagagttttcagaggtgatggtgatccacaggatgtatgtgaggctagctgatctgaatgtggggcagctcgagggagccgagaaagtgaagcgcttgtatgttttttgcgacattatcgagctaccagtcgtggaatggcggtggccgccgcaaataccaggatcggtgacggtgatcatattgtgtcgtcttcttcaatggccaactgatgggaggcagtcggacaccgagctccacctgacattcatgaagttgcatgccatacaacgagaggaaaatcggtgggagataaccgcagcagatggcatgaactggggagtttacatacacgcagaggaagtacaggttggcgtgctgacaatgtcatggtcttcggtacttagagtttcggcacttcgctctgttataacctccggctttcgcgccgttagtgtgtttgaggtaccgggaagtgtaaggtccacccttggagctactttaaggcccgatcacgccttatatagtacaactatgcaagccacacccaacgcatcgcatattagtgcttttaaccttcgcatagtttccccgtcggcatatcgtgtttgtcctctccaaaatgacacagatacctacttaggtattccagcagacgtggcggcagttcttccagtagacgtggtgactgatcctaacatcttgctgggcatgcagacaacggtacacattgcggagctagtcaaggcatgtcatccgtcacccgatgttgtgagcgctgtaggggagcacctgaactggctcaacaaactcttactcccacttaaggaatcgactcagttgcaaggaagcgagtcgtacaaggagtgccttgcactcttgggtcgtgttcacgctgcgatgaagatggtgagaattggcttagtagtgccccagctgcaatacagaatgtacggtagcctcatcaaccaaatggcccaagtagcacaaaactacgaccgagaattcaagcaattcaaattattcatcatccaaaatcaaatccttggcagctatttgctgcagcagaacagggcatttgctgagagggagctgcagatggagagctttcatgctgctgtcatttctcaaagaagggaggagttggacaatacattcgcaaagatggaccgattgagcgggcaaatggaggcagagagtagtgcaatggagcaagccaaaaaggaaatggacgaaggattgaggcagttccagaataggcaagttgcgaacgccctctttgccgttcttagcgctgtagctcagattgggcttgcattccttacggctggtgcaacggctcctggagctgtggcgtcggcggggcaagctgtgagcatagcaggtcaggcggcgcaaggtctgcgaagggtggtggaaattctagagcagctggaggctgtgatggaggttgtggctgctgtgaaggacctcgtggattcattggaacaggtaggtcagattgtggacgcaccggtgatgccggaattgccctcagaggcggactggtccatttttgtgaacgaggtggaggccgtggcagagggcatgccaacggaagtctcggaggttccggtgtggagggccaagtgcaagaatgtggctgcactgggtcgggagatgagcatcacggcagtacagatgtcggagctgcagtatgacatctgggtgcaaggcatgatgcgggatatggctcgaagccaggcagacaggctggccgcaattcaacccgcggaccttaccaactatttggagatggctacccagatggatatgcggactacgaggatgctgctggggctcctcaacatattgcgcatccagaatgcggcgctcaggtacgagtatcttctaatgcccacggagctcacaacatggccactgggtatggataccgtgggtgacttgctcatcgcgcaggagaatgctgcactgataggattaatgcagctagggccctcatctgatttcacgagcaggcatgtggtgaaagacatacctgtgaacttgctgctcgatggcgaggattgggagtttgagattcctgtgcaagctggcatgtccagcttcccttccagctggtctcgcgtccgtattcggcacctggagatgcactttgtgaaggaggccagcggtattggtggtgagattatccaccagcctaccacccagactgggaccgtttacatccttctgcagggttccactatcttccatgaccgcagaagagaccaggtgttgccttttcaggccgctgctccgctcaactaccattacgcgtaccgcctcgacaccggcgactccactctcacaaacgaaccctctgaacagtttgccaacaagttcatgcagatgacacccttcacccgttggaggcttcgtctgtctgcgtccgcaaaagagaatgcaggattagcctttcccacggctacagcacttgactccactacccagattgtcatcactttccatgttacggccatcagacaaattgactggcggcacgacgaagag

SEQ ID NO: 203 - DNA, 2601 bp, synthetic construct
  misc_feature 1..2601: note = Synthetic
  source 1..2601: mol_type = other DNA
atggctctcgtggattacggcaagcttttcgaggatctgaaccagataagcatgggtgtactggatcgggtagagttttcagaggtgatggtgatccacaggatgtatgtgaggctagctgatctgaatgtggggcagctcgagggagccgagaaagtgaagcggttgtatgttttttgcgacattatcgtgctaccagtcgtggaatggcggtggccgccgcaaataccaggatcggtgacggtgatcatattgtgtcgtcttcttcaatggccaactgatgggaggcagtcggacaccgagctccacctgacattcatgaagttgcatgccatacaacgagaggaaaatcggtgggagataaccgcagcagatggcatgaactggggagtttacatacacgcagaggaagtacaggttggcgtgctgacaatgtcatggtcttcggtacttagagtttcggcacttcgctctgttataacctccggctttcgcgccgttagtgtgtttgaggtaccgggaagtgtaaggtccacccttggagctactttaaggcccgatcacgccttatatagtacaactatgcaagccacacccaacgcatcgcatattagtgcttttaaccttcgcatagtttccccgtcggcatatcgtgtttgtcctctccaaaatgacacagatacctacttaggtattccagcagacgtggcggcagttcttccagtagacgtggtgactgatcctaacatcttgctgggcatgcagacaacggtacacattgcggagctagtcaaggcatgtcatccgtcacccgatgttgtgagcgctgtaggggagcacctgaactggctcaacaaactcttactcccacttaaggaatcgactcagttgcaaggaagcgagtcgtacaaggagtgccttgcactcttgggtcgtgttcacgctgcgatgaagatggtgagaattggcttagtagtgccccagctgcaatacagaatgtacggtagcctcatcaaccaaatggcccaagtagcacaaaactacgaccgagaattcaagcaattcaaattattcatcatccaaaatcaaatccttggcagctatttgctgcagcagaacagggcatttgctgagagggagctgcagatggagagctttcatgctgctgtcatttctcaaagaagggaggagttggacaatacattcgcaaagatggaccgattgagcgggcaaatggaggcagagagtagtgcaatggagcaagccaaaaaggaaatggacgaaggattgaggcagttccagaataggcaagttgcgaacgccctctttgccgttcttagcgctgtagctcagattgggcttgcattccttacggctggtgcaacggctcctggagctgtggcgtcggcggggcaagctgtgagcatagcaggtcaggcggcgcaaggtctgcgaagggtggtggaaattctagagcagctggaggctgtgatggaggttgtggctgctgtgaaggacctcgtggattcattggaacaggtaggtcagattgtggacgcaccggtgatgccggaattgccctcagaggcggactggtccatttttgtgaacgaggtggaggccgtggcagagggcatgccaacggaagtctcggaggttccggtgtggagggccaagtgcaagaatgtggctgcactgggtcgggagatgagcatcacggcagtacagatgtcggagctgcagtatgacatctgggtgcaaggcatgatgcgggatatggctcgaagccaggcagacaggctggccgcaattcaacccgcggaccttaccaactatttggagatggctacccagatggatatgcggactacgaggatgctgctggggctcctcaacatattgcgcatccagaatgcggcgctcaggtacgagtatcttctaatgcccacggagctcacaacatggccactgggtatggataccgtgggtgacttgctcatcgcgcaggagaatgctgcactgataggattaatgcagctagggccctcatctgatttcacgagcaggcatgtggtgaaagacatacctgtgaacttgctgctcgatggcgaggattgggagtttgagattcctgtgcaagctggcatgtccagcttcccttccagctggtctcgcgtccgtattcggcacctggagatgcactttgtgaaggaggccagcggtattggtggtgagattatccaccagcctaccacccagactgggaccgtttacatccttctgcagggttccactatcttccatgaccgcagaagagaccaggtgttgccttttcaggccgctgctccgctcaactaccattacgcgtaccgcctcgacaccggcgactccactctcacaaacgaaccctctgaacagtttgccaacaagttcatgcagatgacacccttcacccgttggaggcttcgtctgtctgcgtccgcaaaagagaatgcaggattagcctttcccacggctacagcacttgactccactacccagattgtcatcactttccatgttacggccatcagacaaattgactggcggcacgacgaagag

SEQ ID NO: 204 - DNA, 2601 bp, synthetic construct
  misc_feature 1..2601: note = Synthetic
  source 1..2601: mol_type = other DNA
atggctctcgtggattacggcaagcttttcgaggatctgaaccagataagcatgggtgtactggatcgggtagagttttcagaggtgatggtgatccacaggatgtatgtgaggctagctgatctgaatgtggggcagctcgagggagccgagaaagtgaagcgcttgtatgtttttggcgacattgtcgagctaccagtcgtggaatggcggtggccgccgcaaataccaggatcggtgacggtgatcatattgtgtcgtcttcttcaatggccaactgatgggaggcagtcggacaccgagctccacctgacattcatgaagttgcatgccatacaacgagaggaaaatcggtgggagataaccgcagcagatggcatgaactggggagtttacatacacgcagaggaagtacaggttggcgtgctgacaatgtcatggtcttcggtacttagagtttcggcacttcgctctgttataacctccggctttcgcgccgttagtgtgtttgaggtaccgggaagtgtaaggtccacccttggagctactttaaggcccgatcacgccttatatagtacaactatgcaagccacacccaacgcatcgcatattagtgcttttaaccttcgcatagtttccccgtcggcatatcgtgtttgtcctctccaaaatgacacagatacctacttaggtattccagcagacgtggcggcagttcttccagtagacgtggtgactgatcctaacatcttgctgggcatgcagacaacggtacacattgcggagctagtcaaggcatgtcatccgtcacccgatgttgtgagcgctgtaggggagcacctgaactggctcaacaaactcttactcccacttaaggaatcgactcagttgcaaggaagcgagtcgtacaaggagtgccttgcactcttgggtcgtgttcacgctgcgatgaagatggtgagaattggcttagtagtgccccagctgcaatacagaatgtacggtagcctcatcaaccaaatggcccaagtagcacaaaactacgaccgagaattcaagcaattcaaattattcatcatccaaaatcaaatccttggcagctatttgctgcagcagaacagggcatttgctgagagggagctgcagatggagagctttcatgctgctgtcatttctcaaagaagggaggagttggacaatacattcgcaaagatggaccgattgagcgggcaaatggaggcagagagtagtgcaatggagcaagccaaaaaggaaatggacgaaggattgaggcagttccagaataggcaagttgcgaacgccctctttgccgttcttagcgctgtagctcagattgggcttgcattccttacggctggtgcaacggctcctggagctgtggcgtcggcggggcaagctgtgagcatagcaggtcaggcggcgcaaggtctgcgaagggtggtggaaattctagagcagctggaggctgtgatggaggttgtggctgctgtgaaggacctcgtggattcattggaacaggtaggtcagattgtggacgcaccggtgatgccggaattgccctcagaggcggactggtccatttttgtgaacgaggtggaggccgtggcagagggcatgccaacggaagtctcggaggttccggtgtggagggccaagtgcaagaatgtggctgcactgggtcgggagatgagcatcacggcagtacagatgtcggagctgcagtatgacatctgggtgcaaggcatgatgcgggatatggctcgaagccaggcagacaggctggccgcaattcaacccgcggaccttaccaactatttggagatggctacccagatggatatgcggactacgaggatgctgctggggctcctcaacatattgcgcatccagaatgcggcgctcaggtacgagtatcttctaatgcccacggagctcacaacatggccactgggtatggataccgtgggtgacttgctcatcgcgcaggagaatgctgcactgataggattaatgcagctagggccctcatctgatttcacgagcaggcatgtggtgaaagacatacctgtgaacttgctgctcgatggcgaggattgggagtttgagattcctgtgcaagctggcatgtccagcttcccttccagctggtctcgcgtccgtattcggcacctggagatgcactttgtgaaggaggccagcggtattggtggtgagattatccaccagcctaccacccagactgggaccgtttacatccttctgcagggttccactatcttccatgaccgcagaagagaccaggtgttgccttttcaggccgctgctccgctcaactaccattacgcgtaccgcctcgacaccggcgactccactctcacaaacgaaccctctgaacagtttgccaacaagttcatgcagatgacacccttcacccgttggaggcttcgtctgtctgcgtccgcaaaagagaatgcaggattagcctttcccacggctacagcacttgactccactacccagattgtcatcactttccatgttacggccatcagacaaattgactggcggcacgacgaagag

SEQ ID NO: 205 - DNA, 2601 bp, synthetic construct
  misc_feature 1..2601: note = Synthetic
  source 1..2601: mol_type = other DNA
atggctctcgtggattacggcaagcttttcgaggatctgaaccagataagcatgggtgtactggatcgggtagagttttcagaggtgatggtgatccacaggatgtatgtgaggctagctgatctgaatgtggggcagctcgagggagccgagaaagtgaagcgcttgtatgtttttggcgacgttgtcgagctaccagtcgtggaatggcggtggccgccgcaaataccaggatcggtgacggtgatcatattgtgtcgtcttcttcaatggccaactgatgggaggcagtcggacaccgagctccacctgacattcatgaagttgcatgccatacaacgagaggaaaatcggtgggagataaccgcagcagatggcatgaactggggagtttacatacacgcagaggaagtacaggttggcgtgctgacaatgtcatggtcttcggtacttagagtttcggcacttcgctctgttataacctccggctttcgcgccgttagtgtgtttgaggtaccgggaagtgtaaggtccacccttggagctactttaaggcccgatcacgccttatatagtacaactatgcaagccacacccaacgcatcgcatattagtgcttttaaccttcgcatagtttccccgtcggcatatcgtgtttgtcctctccaaaatgacacagatacctacttaggtattccagcagacgtggcggcagttcttccagtagacgtggtgactgatcctaacatcttgctgggcatgcagacaacggtacacattgcggagctagtcaaggcatgtcatccgtcacccgatgttgtgagcgctgtaggggagcacctgaactggctcaacaaactcttactcccacttaaggaatcgactcagttgcaaggaagcgagtcgtacaaggagtgccttgcactcttgggtcgtgttcacgctgcgatgaagatggtgagaattggcttagtagtgccccagctgcaatacagaatgtacggtagcctcatcaaccaaatggcccaagtagcacaaaactacgaccgagaattcaagcaattcaaattattcatcatccaaaatcaaatccttggcagctatttgctgcagcagaacagggcatttgctgagagggagctgcagatggagagctttcatgctgctgtcatttctcaaagaagggaggagttggacaatacattcgcaaagatggaccgattgagcgggcaaatggaggcagagagtagtgcaatggagcaagccaaaaaggaaatggacgaaggattgaggcagttccagaataggcaagttgcgaacgccctctttgccgttcttagcgctgtagctcagattgggcttgcattccttacggctggtgcaacggctcctggagctgtggcgtcggcggggcaagctgtgagcatagcaggtcaggcggcgcaaggtctgcgaagggtggtggaaattctagagcagctggaggctgtgatggaggttgtggctgctgtgaaggacctcgtggattcattggaacaggtaggtcagattgtggacgcaccggtgatgccggaattgccctcagaggcggactggtccatttttgtgaacgaggtggaggccgtggcagagggcatgccaacggaagtctcggaggttccggtgtggagggccaagtgcaagaatgtggctgcactgggtcgggagatgagcatcacggcagtacagatgtcggagctgcagtatgacatctgggtgcaaggcatgatgcgggatatggctcgaagccaggcagacaggctggccgcaattcaacccgcggaccttaccaactatttggagatggctacccagatggatatgcggactacgaggatgctgctggggctcctcaacatattgcgcatccagaatgcggcgctcaggtacgagtatcttctaatgcccacggagctcacaacatggccactgggtatggataccgtgggtgacttgctcatcgcgcaggagaatgctgcactgataggattaatgcagctagggccctcatctgatttcacgagcaggcatgtggtgaaagacatacctgtgaacttgctgctcgatggcgaggattgggagtttgagattcctgtgcaagctggcatgtccagcttcccttccagctggtctcgcgtccgtattcggcacctggagatgcactttgtgaaggaggccagcggtattggtggtgagattatccaccagcctaccacccagactgggaccgtttacatccttctgcagggttccactatcttccatgaccgcagaagagaccaggtgttgccttttcaggccgctgctccgctcaactaccattacgcgtaccgcctcgacaccggcgactccactctcacaaacgaaccctctgaacagtttgccaacaagttcatgcagatgacacccttcacccgttggaggcttcgtctgtctgcgtccgcaaaagagaatgcaggattagcctttcccacggctacagcacttgactccactacccagattgtcatcactttccatgttacggccatcagacaaattgactggcggcacgacgaagag

SEQ ID NO: 206 - DNA, 2601 bp, synthetic construct
  misc_feature 1..2601: note = Synthetic
  source 1..2601: mol_type = other DNA
atggctctcgtggattacggcaagcttttcgaggatctgaaccagataagcatgggtgtactggatcgggtagagttttcagaggtgatggtgatccacaggatgtatgtgaggctagctgatctgaatgtggggcagctcgagggagccgagaaagtgaagcgcttgtatgtttttagcgacattatcgagctaccagtcgtggaatggcggtggccgccgcaaataccaggatcggtgacggtgatcatattgtgtcgtcttcttcaatggccaactgatgggaggcagtcggacaccgagctccacctgacattcatgaagttgcatgccatacaacgagaggaaaatcggtgggagataaccgcagcagatggcatgaactggggagtttacatacacgcagaggaagtacaggttggcgtgctgacaatgtcatggtcttcggtacttagagtttcggcacttcgctctgttataacctccggctttcgcgccgttagtgtgtttgaggtaccgggaagtgtaaggtccacccttggagctactttaaggcccgatcacgccttatatagtacaactatgcaagccacacccaacgcatcgcatattagtgcttttaaccttcgcatagtttccccgtcggcatatcgtgtttgtcctctccaaaatgacacagatacctacttaggtattccagcagacgtggcggcagttcttccagtagacgtggtgactgatcctaacatcttgctgggcatgcagacaacggtacacattgcggagctagtcaaggcatgtcatccgtcacccgatgttgtgagcgctgtaggggagcacctgaactggctcaacaaactcttactcccacttaaggaatcgactcagttgcaaggaagcgagtcgtacaaggagtgccttgcactcttgggtcgtgttcacgctgcgatgaagatggtgagaattggcttagtagtgccccagctgcaatacagaatgtacggtagcctcatcaaccaaatggcccaagtagcacaaaactacgaccgagaattcaagcaattcaaattattcatcatccaaaatcaaatccttggcagctatttgctgcagcagaacagggcatttgctgagagggagctgcagatggagagctttcatgctgctgtcatttctcaaagaagggaggagttggacaatacattcgcaaagatggaccgattgagcgggcaaatggaggcagagagtagtgcaatggagcaagccaaaaaggaaatggacgaaggattgaggcagttccagaataggcaagttgcgaacgccctctttgccgttcttagcgctgtagctcagattgggcttgcattccttacggctggtgcaacggctcctggagctgtggcgtcggcggggcaagctgtgagcatagcaggtcaggcggcgcaaggtctgcgaagggtggtggaaattctagagcagctggaggctgtgatggaggttgtggctgctgtgaaggacctcgtggattcattggaacaggtaggtcagattgtggacgcaccggtgatgccggaattgccctcagaggcggactggtccatttttgtgaacgaggtggaggccgtggcagagggcatgccaacggaagtctcggaggttccggtgtggagggccaagtgcaagaatgtggctgcactgggtcgggagatgagcatcacggcagtacagatgtcggagctgcagtatgacatctgggtgcaaggcatgatgcgggatatggctcgaagccaggcagacaggctggccgcaattcaacccgcggaccttaccaactatttggagatggctacccagatggatatgcggactacgaggatgctgctggggctcctcaacatattgcgcatccagaatgcggcgctcaggtacgagtatcttctaatgcccacggagctcacaacatggccactgggtatggataccgtgggtgacttgctcatcgcgcaggagaatgctgcactgataggattaatgcagctagggccctcatctgatttcacgagcaggcatgtggtgaaagacatacctgtgaacttgctgctcgatggcgaggattgggagtttgagattcctgtgcaagctggcatgtccagcttcccttccagctggtctcgcgtccgtattcggcacctggagatgcactttgtgaaggaggccagcggtattggtggtgagattatccaccagcctaccacccagactgggaccgtttacatccttctgcagggttccactatcttccatgaccgcagaagagaccaggtgttgccttttcaggccgctgctccgctcaactaccattacgcgtaccgcctcgacaccggcgactccactctcacaaacgaaccctctgaacagtttgccaacaagttcatgcagatgacacccttcacccgttggaggcttcgtctgtctgcgtccgcaaaagagaatgcaggattagcctttcccacggctacagcacttgactccactacccagattgtcatcactttccatgttacggccatcagacaaattgactggcggcacgacgaagag

SEQ ID NO: 207 - DNA, 2601 bp, synthetic construct
  misc_feature 1..2601: note = Synthetic
  source 1..2601: mol_type = other DNA
atggctctcgtggattacggcaagcttttcgaggatctgaaccagataagcatgggtgtactggatcgggtagagttttcagaggtgatggtgatccacaggatgtatgtgaggctagctgatctgaatgtggggcagctcgagggagccgagaaagtgaagcgcttgtatgttttttccgacattgtcgagctaccagtcgtggaatggcggtggccgccgcaaataccaggatcggtgacggtgatcatattgtgtcgtcttcttcaatggccaactgatgggaggcagtcggacaccgagctccacctgacattcatgaagttgcatgccatacaacgagaggaaaatcggtgggagataaccgcagcagatggcatgaactggggagtttacatacacgcagaggaagtacaggttggcgtgctgacaatgtcatggtcttcggtacttagagtttcggcacttcgctctgttataacctccggctttcgcgccgttagtgtgtttgaggtaccgggaagtgtaaggtccacccttggagctactttaaggcccgatcacgccttatatagtacaactatgcaagccacacccaacgcatcgcatattagtgcttttaaccttcgcatagtttccccgtcggcatatcgtgtttgtcctctccaaaatgacacagatacctacttaggtattccagcagacgtggcggcagttcttccagtagacgtggtgactgatcctaacatcttgctgggcatgcagacaacggtacacattgcggagctagtcaaggcatgtcatccgtcacccgatgttgtgagcgctgtaggggagcacctgaactggctcaacaaactcttactcccacttaaggaatcgactcagttgcaaggaagcgagtcgtacaaggagtgccttgcactcttgggtcgtgttcacgctgcgatgaagatggtgagaattggcttagtagtgccccagctgcaatacagaatgtacggtagcctcatcaaccaaatggcccaagtagcacaaaactacgaccgagaattcaagcaattcaaattattcatcatccaaaatcaaatccttggcagctatttgctgcagcagaacagggcatttgctgagagggagctgcagatggagagctttcatgctgctgtcatttctcaaagaagggaggagttggacaatacattcgcaaagatggaccgattgagcgggcaaatggaggcagagagtagtgcaatggagcaagccaaaaaggaaatggacgaaggattgaggcagttccagaataggcaagttgcgaacgccctctttgccgttcttagcgctgtagctcagattgggcttgcattccttacggctggtgcaacggctcctggagctgtggcgtcggcggggcaagctgtgagcatagcaggtcaggcggcgcaaggtctgcgaagggtggtggaaattctagagcagctggaggctgtgatggaggttgtggctgctgtgaaggacctcgtggattcattggaacaggtaggtcagattgtggacgcaccggtgatgccggaattgccctcagaggcggactggtccatttttgtgaacgaggtggaggccgtggcagagggcatgccaacggaagtctcggaggttccggtgtggagggccaagtgcaagaatgtggctgcactgggtcgggagatgagcatcacggcagtacagatgtcggagctgcagtatgacatctgggtgcaaggcatgatgcgggatatggctcgaagccaggcagacaggctggccgcaattcaacccgcggaccttaccaactatttggagatggctacccagatggatatgcggactacgaggatgctgctggggctcctcaacatattgcgcatccagaatgcggcgctcaggtacgagtatcttctaatgcccacggagctcacaacatggccactgggtatggataccgtgggtgacttgctcatcgcgcaggagaatgctgcactgataggattaatgcagctagggccctcatctgatttcacgagcaggcatgtggtgaaagacatacctgtgaacttgctgctcgatggcgaggattgggagtttgagattcctgtgcaagctggcatgtccagcttcccttccagctggtctcgcgtccgtattcggcacctggagatgcactttgtgaaggaggccagcggtattggtggtgagattatccaccagcctaccacccagactgggaccgtttacatccttctgcagggttccactatcttccatgaccgcagaagagaccaggtgttgccttttcaggccgctgctccgctcaactaccattacgcgtaccgcctcgacaccggcgactccactctcacaaacgaaccctctgaacagtttgccaacaagttcatgcagatgacacccttcacccgttggaggcttcgtctgtctgcgtccgcaaaagagaatgcaggattagcctttcccacggctacagcacttgactccactacccagattgtcatcactttccatgttacggccatcagacaaattgactggcggcacgacgaagag

SEQ ID NO: 208 - DNA, 2601 bp, synthetic construct
  misc_feature 1..2601: note = Synthetic
  source 1..2601: mol_type = other DNA
atggctctcgtggattacggcaagcttttcgaggatctgaaccagataagcatgggtgtactggatcgggtagagttttcagaggtgatggtgatccacaggatgtatgtgaggctagctgatctgaatgtggggcagctcgagggagccgagaaagtgaagcgcttgtatgttttttccgacgttatcgagctaccagtcgtggaatggcggtggccgccgcaaataccaggatcggtgacggtgatcatattgtgtcgtcttcttcaatggccaactgatgggaggcagtcggacaccgagctccacctgacattcatgaagttgcatgccatacaacgagaggaaaatcggtgggagataaccgcagcagatggcatgaactggggagtttacatacacgcagaggaagtacaggttggcgtgctgacaatgtcatggtcttcggtacttagagtttcggcacttcgctctgttataacctccggctttcgcgccgttagtgtgtttgaggtaccgggaagtgtaaggtccacccttggagctactttaaggcccgatcacgccttatatagtacaactatgcaagccacacccaacgcatcgcatattagtgcttttaaccttcgcatagtttccccgtcggcatatcgtgtttgtcctctccaaaatgacacagatacctacttaggtattccagcagacgtggcggcagttcttccagtagacgtggtgactgatcctaacatcttgctgggcatgcagacaacggtacacattgcggagctagtcaaggcatgtcatccgtcacccgatgttgtgagcgctgtaggggagcacctgaactggctcaacaaactcttactcccacttaaggaatcgactcagttgcaaggaagcgagtcgtacaaggagtgccttgcactcttgggtcgtgttcacgctgcgatgaagatggtgagaattggcttagtagtgccccagctgcaatacagaatgtacggtagcctcatcaaccaaatggcccaagtagcacaaaactacgaccgagaattcaagcaattcaaattattcatcatccaaaatcaaatccttggcagctatttgctgcagcagaacagggcatttgctgagagggagctgcagatggagagctttcatgctgctgtcatttctcaaagaagggaggagttggacaatacattcgcaaagatggaccgattgagcgggcaaatggaggcagagagtagtgcaatggagcaagccaaaaaggaaatggacgaaggattgaggcagttccagaataggcaagttgcgaacgccctctttgccgttcttagcgctgtagctcagattgggcttgcattccttacggctggtgcaacggctcctggagctgtggcgtcggcggggcaagctgtgagcatagcaggtcaggcggcgcaaggtctgcgaagggtggtggaaattctagagcagctggaggctgtgatggaggttgtggctgctgtgaaggacctcgtggattcattggaacaggtaggtcagattgtggacgcaccggtgatgccggaattgccctcagaggcggactggtccatttttgtgaacgaggtggaggccgtggcagagggcatgccaacggaagtctcggaggttccggtgtggagggccaagtgcaagaatgtggctgcactgggtcgggagatgagcatcacggcagtacagatgtcggagctgcagtatgacatctgggtgcaaggcatgatgcgggatatggctcgaagccaggcagacaggctggccgcaattcaacccgcggaccttaccaactatttggagatggctacccagatggatatgcggactacgaggatgctgctggggctcctcaacatattgcgcatccagaatgcggcgctcaggtacgagtatcttctaatgcccacggagctcacaacatggccactgggtatggataccgtgggtgacttgctcatcgcgcaggagaatgctgcactgataggattaatgcagctagggccctcatctgatttcacgagcaggcatgtggtgaaagacatacctgtgaacttgctgctcgatggcgaggattgggagtttgagattcctgtgcaagctggcatgtccagcttcccttccagctggtctcgcgtccgtattcggcacctggagatgcactttgtgaaggaggccagcggtattggtggtgagattatccaccagcctaccacccagactgggaccgtttacatccttctgcagggttccactatcttccatgaccgcagaagagaccaggtgttgccttttcaggccgctgctccgctcaactaccattacgcgtaccgcctcgacaccggcgactccactctcacaaacgaaccctctgaacagtttgccaacaagttcatgcagatgacacccttcacccgttggaggcttcgtctgtctgcgtccgcaaaagagaatgcaggattagcctttcccacggctacagcacttgactccactacccagattgtcatcactttccatgttacggccatcagacaaattgactggcggcacgacgaagag

SEQ ID NO: 209 - DNA, 2601 bp, synthetic construct
  misc_feature 1..2601: note = Synthetic
  source 1..2601: mol_type = other DNA
atggctctcgtggattacggcaagcttttcgaggatctgaaccagataagcatgggtgtactggatcgggtagagttttcagaggtgatggtgatccacaggatgtatgtgaggctagctgatctgaatgtggggcagctcgagggagccgagaaagtgaagcgcttgtatgtttttaccgacgttatcgtgctaccagtcgtggaatggcggtggccgccgcaaataccaggatcggtgacggtgatcatattgtgtcgtcttcttcaatggccaactgatgggaggcagtcggacaccgagctccacctgacattcatgaagttgcatgccatacaacgagaggaaaatcggtgggagataaccgcagcagatggcatgaactggggagtttacatacacgcagaggaagtacaggttggcgtgctgacaatgtcatggtcttcggtacttagagtttcggcacttcgctctgttataacctccggctttcgcgccgttagtgtgtttgaggtaccgggaagtgtaaggtccacccttggagctactttaaggcccgatcacgccttatatagtacaactatgcaagccacacccaacgcatcgcatattagtgcttttaaccttcgcatagtttccccgtcggcatatcgtgtttgtcctctccaaaatgacacagatacctacttaggtattccagcagacgtggcggcagttcttccagtagacgtggtgactgatcctaacatcttgctgggcatgcagacaacggtacacattgcggagctagtcaaggcatgtcatccgtcacccgatgttgtgagcgctgtaggggagcacctgaactggctcaacaaactcttactcccacttaaggaatcgactcagttgcaaggaagcgagtcgtacaaggagtgccttgcactcttgggtcgtgttcacgctgcgatgaagatggtgagaattggcttagtagtgccccagctgcaatacagaatgtacggtagcctcatcaaccaaatggcccaagtagcacaaaactacgaccgagaattcaagcaattcaaattattcatcatccaaaatcaaatccttggcagctatttgctgcagcagaacagggcatttgctgagagggagctgcagatggagagctttcatgctgctgtcatttctcaaagaagggaggagttggacaatacattcgcaaagatggaccgattgagcgggcaaatggaggcagagagtagtgcaatggagcaagccaaaaaggaaatggacgaaggattgaggcagttccagaataggcaagttgcgaacgccctctttgccgttcttagcgctgtagctcagattgggcttgcattccttacggctggtgcaacggctcctggagctgtggcgtcggcggggcaagctgtgagcatagcaggtcaggcggcgcaaggtctgcgaagggtggtggaaattctagagcagctggaggctgtgatggaggttgtggctgctgtgaaggacctcgtggattcattggaacaggtaggtcagattgtggacgcaccggtgatgccggaattgccctcagaggcggactggtccatttttgtgaacgaggtggaggccgtggcagagggcatgccaacggaagtctcggaggttccggtgtggagggccaagtgcaagaatgtggctgcactgggtcgggagatgagcatcacggcagtacagatgtcggagctgcagtatgacatctgggtgcaaggcatgatgcgggatatggctcgaagccaggcagacaggctggccgcaattcaacccgcggaccttaccaactatttggagatggctacccagatggatatgcggactacgaggatgctgctggggctcctcaacatattgcgcatccagaatgcggcgctcaggtacgagtatcttctaatgcccacggagctcacaacatggccactgggtatggataccgtgggtgacttgctcatcgcgcaggagaatgctgcactgataggattaatgcagctagggccctcatctgatttcacgagcaggcatgtggtgaaagacatacctgtgaacttgctgctcgatggcgaggattgggagtttgagattcctgtgcaagctggcatgtccagcttcccttccagctggtctcgcgtccgtattcggcacctggagatgcactttgtgaaggaggccagcggtattggtggtgagattatccaccagcctaccacccagactgggaccgtttacatccttctgcagggttccactatcttccatgaccgcagaagagaccaggtgttgccttttcaggccgctgctccgctcaactaccattacgcgtaccgcctcgacaccggcgactccactctcacaaacgaaccctctgaacagtttgccaacaagttcatgcagatgacacccttcacccgttggaggcttcgtctgtctgcgtccgcaaaagagaatgcaggattagcctttcccacggctacagcacttgactccactacccagattgtcatcactttccatgttacggccatcagacaaattgactggcggcacgacgaagag

SEQ ID NO: 210 - DNA, 2601 bp, synthetic construct
  misc_feature 1..2601: note = Synthetic
  source 1..2601: mol_type = other DNA
atggctctcgtggattacggcaagcttttcgaggatctgaaccagataagcatgggtgtactggatcgggtagagttttcagaggtgatggtgatccacaggatgtatgtgaggctagctgatctgaatgtggggcagctcgagggagccgagaaagtgaagcgcttgtatgtttttaccgacgttgtcgtgctaccagtcgtggaatggcggtggccgccgcaaataccaggatcggtgacggtgatcatattgtgtcgtcttcttcaatggccaactgatgggaggcagtcggacaccgagctccacctgacattcatgaagttgcatgccatacaacgagaggaaaatcggtgggagataaccgcagcagatggcatgaactggggagtttacatacacgcagaggaagtacaggttggcgtgctgacaatgtcatggtcttcggtacttagagtttcggcacttcgctctgttataacctccggctttcgcgccgttagtgtgtttgaggtaccgggaagtgtaaggtccacccttggagctactttaaggcccgatcacgccttatatagtacaactatgcaagccacacccaacgcatcgcatattagtgcttttaaccttcgcatagtttccccgtcggcatatcgtgtttgtcctctccaaaatgacacagatacctacttaggtattccagcagacgtggcggcagttcttccagtagacgtggtgactgatcctaacatcttgctgggcatgcagacaacggtacacattgcggagctagtcaaggcatgtcatccgtcacccgatgttgtgagcgctgtaggggagcacctgaactggctcaacaaactcttactcccacttaaggaatcgactcagttgcaaggaagcgagtcgtacaaggagtgccttgcactcttgggtcgtgttcacgctgcgatgaagatggtgagaattggcttagtagtgccccagctgcaatacagaatgtacggtagcctcatcaaccaaatggcccaagtagcacaaaactacgaccgagaattcaagcaattcaaattattcatcatccaaaatcaaatccttggcagctatttgctgcagcagaacagggcatttgctgagagggagctgcagatggagagctttcatgctgctgtcatttctcaaagaagggaggagttggacaatacattcgcaaagatggaccgattgagcgggcaaatggaggcagagagtagtgcaatggagcaagccaaaaaggaaatggacgaaggattgaggcagttccagaataggcaagttgcgaacgccctctttgccgttcttagcgctgtagctcagattgggcttgcattccttacggctggtgcaacggctcctggagctgtggcgtcggcggggcaagctgtgagcatagcaggtcaggcggcgcaaggtctgcgaagggtggtggaaattctagagcagctggaggctgtgatggaggttgtggctgctgtgaaggacctcgtggattcattggaacaggtaggtcagattgtggacgcaccggtgatgccggaattgccctcagaggcggactggtccatttttgtgaacgaggtggaggccgtggcagagggcatgccaacggaagtctcggaggttccggtgtggagggccaagtgcaagaatgtggctgcactgggtcgggagatgagcatcacggcagtacagatgtcggagctgcagtatgacatctgggtgcaaggcatgatgcgggatatggctcgaagccaggcagacaggctggccgcaattcaacccgcggaccttaccaactatttggagatggctacccagatggatatgcggactacgaggatgctgctggggctcctcaacatattgcgcatccagaatgcggcgctcaggtacgagtatcttctaatgcccacggagctcacaacatggccactgggtatggataccgtgggtgacttgctcatcgcgcaggagaatgctgcactgataggattaatgcagctagggccctcatctgatttcacgagcaggcatgtggtgaaagacatacctgtgaacttgctgctcgatggcgaggattgggagtttgagattcctgtgcaagctggcatgtccagcttcccttccagctggtctcgcgtccgtattcggcacctggagatgcactttgtgaaggaggccagcggtattggtggtgagattatccaccagcctaccacccagactgggaccgtttacatccttctgcagggttccactatcttccatgaccgcagaagagaccaggtgttgccttttcaggccgctgctccgctcaactaccattacgcgtaccgcctcgacaccggcgactccactctcacaaacgaaccctctgaacagtttgccaacaagttcatgcagatgacacccttcacccgttggaggcttcgtctgtctgcgtccgcaaaagagaatgcaggattagcctttcccacggctacagcacttgactccactacccagattgtcatcactttccatgttacggccatcagacaaattgactggcggcacgacgaagag

SEQ ID NO: 211 - DNA, 2601 bp, synthetic construct
  misc_feature 1..2601: note = Synthetic
  source 1..2601: mol_type = other DNA
atggctctcgtggattacggcaagcttttcgaggatctgaaccagataagcatgggtgtactggatcgggtagagttttcagaggtgatggtgatccacaggatgtatgtgaggctagctgatctgaatgtggggcagctcgagggagccgagaaagtgatgcacttgtatatttttgccgacgttatcgagctaccagtcgtggaatggcggtggccgccgcaaataccaggatcggtgacggtgatcatattgtgtcgtcttcttcaatggccaactgatgggaggcagtcggacaccgagctccacctgacattcatgaagttgcatgccatacaacgagaggaaaatcggtgggagataaccgcagcagatggcatgaactggggagtttacatacacgcagaggaagtacaggttggcgtgctgacaatgtcatggtcttcggtacttagagtttcggcacttcgctctgttataacctccggctttcgcgccgttagtgtgtttgaggtaccgggaagtgtaaggtccacccttggagctactttaaggcccgatcacgccttatatagtacaactatgcaagccacacccaacgcatcgcatattagtgcttttaaccttcgcatagtttccccgtcggcatatcgtgtttgtcctctccaaaatgacacagatacctacttaggtattccagcagacgtggcggcagttcttccagtagacgtggtgactgatcctaacatcttgctgggcatgcagacaacggtacacattgcggagctagtcaaggcatgtcatccgtcacccgatgttgtgagcgctgtaggggagcacctgaactggctcaacaaactcttactcccacttaaggaatcgactcagttgcaaggaagcgagtcgtacaaggagtgccttgcactcttgggtcgtgttcacgctgcgatgaagatggtgagaattggcttagtagtgccccagctgcaatacagaatgtacggtagcctcatcaaccaaatggcccaagtagcacaaaactacgaccgagaattcaagcaattcaaattattcatcatccaaaatcaaatccttggcagctatttgctgcagcagaacagggcatttgctgagagggagctgcagatggagagctttcatgctgctgtcatttctcaaagaagggaggagttggacaatacattcgcaaagatggaccgattgagcgggcaaatggaggcagagagtagtgcaatggagcaagccaaaaaggaaatggacgaaggattgaggcagttccagaataggcaagttgcgaacgccctctttgccgttcttagcgctgtagctcagattgggcttgcattccttacggctggtgcaacggctcctggagctgtggcgtcggcggggcaagctgtgagcatagcaggtcaggcggcgcaaggtctgcgaagggtggtggaaattctagagcagctggaggctgtgatggaggttgtggctgctgtgaaggacctcgtggattcattggaacaggtaggtcagattgtggacgcaccggtgatgccggaattgccctcagaggcggactggtccatttttgtgaacgaggtggaggccgtggcagagggcatgccaacggaagtctcggaggttccggtgtggagggccaagtgcaagaatgtggctgcactgggtcgggagatgagcatcacggcagtacagatgtcggagctgcagtatgacatctgggtgcaaggcatgatgcgggatatggctcgaagccaggcagacaggctggccgcaattcaacccgcggaccttaccaactatttggagatggctacccagatggatatgcggactacgaggatgctgctggggctcctcaacatattgcgcatccagaatgcggcgctcaggtacgagtatcttctaatgcccacggagctcacaacatggccactgggtatggataccgtgggtgacttgctcatcgcgcaggagaatgctgcactgataggattaatgcagctagggccctcatctgatttcacgagcaggcatgtggtgaaagacatacctgtgaacttgctgctcgatggcgaggattgggagtttgagattcctgtgcaagctggcatgtccagcttcccttccagctggtctcgcgtccgtattcggcacctggagatgcactttgtgaaggaggccagcggtattggtggtgagattatccaccagcctaccacccagactgggaccgtttacatccttctgcagggttccactatcttccatgaccgcagaagagaccaggtgttgccttttcaggccgctgctccgctcaactaccattacgcgtaccgcctcgacaccggcgactccactctcacaaacgaaccctctgaacagtttgccaacaagttcatgcagatgacacccttcacccgttggaggcttcgtctgtctgcgtccgcaaaagagaatgcaggattagcctttcccacggctacagcacttgactccactacccagattgtcatcactttccatgttacggccatcagacaaattgactggcggcacgacgaagag

SEQ ID NO: 212 - DNA, 2601 bp, synthetic construct
  misc_feature 1..2601: note = Synthetic
  source 1..2601: mol_type = other DNA
atggctctcgtggattacggcaagcttttcgaggatctgaaccagataagcatgggtgtactggatcgggtagagttttcagaggtgatggtgatccacaggatgtatgtgaggctagctgatctgaatgtggggcagctcgagggagccgagaaagtgatgcagttgtatattttttgcgacattctcgagctaccagtcgtggaatggcggtggccgacgcaaataccaggatcggtgacggtgatcatattgtgtcgtcttcttcaatggccaactgatgggaggcagtcggacaccgagctccacctgacattcatgaagttgcatgccatacaacgagaggaaaatcggtgggagataaccgcagcagatggcatgaactggggagtttacatacacgcagaggaagtacaggttggcgtgctgacaatgtcatggtcttcggtacttagagtttcggcacttcgctctgttataacctccggctttcgcgccgttagtgtgtttgaggtaccgggaagtgtaaggtccacccttggagctactttaaggcccgatcacgccttatatagtacaactatgcaagccacacccaacgcatcgcatattagtgcttttaaccttcgcatagtttccccgtcggcatatcgtgtttgtcctctccaaaatgacacagatacctacttaggtattccagcagacgtggcggcagttcttccagtagacgtggtgactgatcctaacatcttgctgggcatgcagacaacggtacacattgcggagctagtcaaggcatgtcatccgtcacccgatgttgtgagcgctgtaggggagcacctgaactggctcaacaaactcttactcccacttaaggaatcgactcagttgcaaggaagcgagtcgtacaaggagtgccttgcactcttgggtcgtgttcacgctgcgatgaagatggtgagaattggcttagtagtgccccagctgcaatacagaatgtacggtagcctcatcaaccaaatggcccaagtagcacaaaactacgaccgagaattcaagcaattcaaattattcatcatccaaaatcaaatccttggcagctatttgctgcagcagaacagggcatttgctgagagggagctgcagatggagagctttcatgctgctgtcatttctcaaagaagggaggagttggacaatacattcgcaaagatggaccgattgagcgggcaaatggaggcagagagtagtgcaatggagcaagccaaaaaggaaatggacgaaggattgaggcagttccagaataggcaagttgcgaacgccctctttgccgttcttagcgctgtagctcagattgggcttgcattccttacggctggtgcaacggctcctggagctgtggcgtcggcggggcaagctgtgagcatagcaggtcaggcggcgcaaggtctgcgaagggtggtggaaattctagagcagctggaggctgtgatggaggttgtggctgctgtgaaggacctcgtggattcattggaacaggtaggtcagattgtggacgcaccggtgatgccggaattgccctcagaggcggactggtccatttttgtgaacgaggtggaggccgtggcagagggcatgccaacggaagtctcggaggttccggtgtggagggccaagtgcaagaatgtggctgcactgggtcgggagatgagcatcacggcagtacagatgtcggagctgcagtatgacatctgggtgcaaggcatgatgcgggatatggctcgaagccaggcagacaggctggccgcaattcaacccgcggaccttaccaactatttggagatggctacccagatggatatgcggactacgaggatgctgctggggctcctcaacatattgcgcatccagaatgcggcgctcaggtacgagtatcttctaatgcccacggagctcacaacatggccactgggtatggataccgtgggtgacttgctcatcgcgcaggagaatgctgcactgataggattaatgcagctagggccctcatctgatttcacgagcaggcatgtggtgaaagacatacctgtgaacttgctgctcgatggcgaggattgggagtttgagattcctgtgcaagctggcatgtccagcttcccttccagctggtctcgcgtccgtattcggcacctggagatgcactttgtgaaggaggccagcggtattggtggtgagattatccaccagcctaccacccagactgggaccgtttacatccttctgcagggttccactatcttccatgaccgcagaagagaccaggtgttgccttttcaggccgctgctccgctcaactaccattacgcgtaccgcctcgacaccggcgactccactctcacaaacgaaccctctgaacagtttgccaacaagttcatgcagatgacacccttcacccgttggaggcttcgtctgtctgcgtccgcaaaagagaatgcaggattagcctttcccacggctacagcacttgactccactacccagattgtcatcactttccatgttacggccatcagacaaattgactggcggcacgacgaagag

SEQ ID NO: 213 - DNA, 2601 bp, synthetic construct
  misc_feature 1..2601: note = Synthetic
  source 1..2601: mol_type = other DNA
atggctctcgtggattacggcaagcttttcgaggatctgaaccagataagcatgggtgtactggatcgggtagagttttcagaggtgatggtgatccacaggatgtatgtgaggctagctgatctgaatgtggggcagctcgagggagccgagaaagtgatgcgcttgtatatttttgccgacgttgtcgtgctaccagtcgtggaatggcggtggccgccgcaaataccaggatcggtgacggtgatcatattgtgtcgtcttcttcaatggccaactgatgggaggcagtcggacaccgagctccacctgacattcatgaagttgcatgccatacaacgagaggaaaatcggtgggagataaccgcagcagatggcatgaactggggagtttacatacacgcagaggaagtacaggttggcgtgctgacaatgtcatggtcttcggtacttagagtttcggcacttcgctctgttataacctccggctttcgcgccgttagtgtgtttgaggtaccgggaagtgtaaggtccacccttggagctactttaaggcccgatcacgccttatatagtacaactatgcaagccacacccaacgcatcgcatattagtgcttttaaccttcgcatagtttccccgtcggcatatcgtgtttgtcctctccaaaatgacacagatacctacttaggtattccagcagacgtggcggcagttcttccagtagacgtggtgactgatcctaacatcttgctgggcatgcagacaacggtacacattgcggagctagtcaaggcatgtcatccgtcacccgatgttgtgagcgctgtaggggagcacctgaactggctcaacaaactcttactcccacttaaggaatcgactcagttgcaaggaagcgagtcgtacaaggagtgccttgcactcttgggtcgtgttcacgctgcgatgaagatggtgagaattggcttagtagtgccccagctgcaatacagaatgtacggtagcctcatcaaccaaatggcccaagtagcacaaaactacgaccgagaattcaagcaattcaaattattcatcatccaaaatcaaatccttggcagctatttgctgcagcagaacagggcatttgctgagagggagctgcagatggagagctttcatgctgctgtcatttctcaaagaagggaggagttggacaatacattcgcaaagatggaccgattgagcgggcaaatggaggcagagagtagtgcaatggagcaagccaaaaaggaaatggacgaaggattgaggcagttccagaataggcaagttgcgaacgccctctttgccgttcttagcgctgtagctcagattgggcttgcattccttacggctggtgcaacggctcctggagctgtggcgtcggcggggcaagctgtgagcatagcaggtcaggcggcgcaaggtctgcgaagggtggtggaaattctagagcagctggaggctgtgatggaggttgtggctgctgtgaaggacctcgtggattcattggaacaggtaggtcagattgtggacgcaccggtgatgccggaattgccctcagaggcggactggtccatttttgtgaacgaggtggaggccgtggcagagggcatgccaacggaagtctcggaggttccggtgtggagggccaagtgcaagaatgtggctgcactgggtcgggagatgagcatcacggcagtacagatgtcggagctgcagtatgacatctgggtgcaaggcatgatgcgggatatggctcgaagccaggcagacaggctggccgcaattcaacccgcggaccttaccaactatttggagatggctacccagatggatatgcggactacgaggatgctgctggggctcctcaacatattgcgcatccagaatgcggcgctcaggtacgagtatcttctaatgcccacggagctcacaacatggccactgggtatggataccgtgggtgacttgctcatcgcgcaggagaatgctgcactgataggattaatgcagctagggccctcatctgatttcacgagcaggcatgtggtgaaagacatacctgtgaacttgctgctcgatggcgaggattgggagtttgagattcctgtgcaagctggcatgtccagcttcccttccagctggtctcgcgtccgtattcggcacctggagatgcactttgtgaaggaggccagcggtattggtggtgagattatccaccagcctaccacccagactgggaccgtttacatccttctgcagggttccactatcttccatgaccgcagaagagaccaggtgttgccttttcaggccgctgctccgctcaactaccattacgcgtaccgcctcgacaccggcgactccactctcacaaacgaaccctctgaacagtttgccaacaagttcatgcagatgacacccttcacccgttggaggcttcgtctgtctgcgtccgcaaaagagaatgcaggattagcctttcccacggctacagcacttgactccactacccagattgtcatcactttccatgttacggccatcagacaaattgactggcggcacgacgaagag

SEQ ID NO: 214 - DNA, 2601 bp, synthetic construct
  misc_feature 1..2601: note = Synthetic
  source 1..2601: mol_type = other DNA
atggctctcgtggattacggcaagcttttcgaggatctgaaccagataagcatgggtgtactggatcgggtagagttttcagaggtgatggtgatccacaggatgtatgtgaggctagctgatctgaatgtggggcagctcgagggagccgagaaagtgatgcgcttgtatattttttgcgacgttatcgagctaccagtcgtggaatggcggtggccgccgcaaataccaggatcggtgacggtgatcatattgtgtcgtcttcttcaatggccaactgatgggaggcagtcggacaccgagctccacctgacattcatgaagttgcatgccatacaacgagaggaaaatcggtgggagataaccgcagcagatggcatgaactggggagtttacatacacgcagaggaagtacaggttggcgtgctgacaatgtcatggtcttcggtacttagagtttcggcacttcgctctgttataacctccggctttcgcgccgttagtgtgtttgaggtaccgggaagtgtaaggtccacccttggagctactttaaggcccgatcacgccttatatagtacaactatgcaagccacacccaacgcatcgcatattagtgcttttaaccttcgcatagtttccccgtcggcatatcgtgtttgtcctctccaaaatgacacagatacctacttaggtattccagcagacgtggcggcagttcttccagtagacgtggtgactgatcctaacatcttgctgggcatgcagacaacggtacacattgcggagctagtcaaggcatgtcatccgtcacccgatgttgtgagcgctgtaggggagcacctgaactggctcaacaaactcttactcccacttaaggaatcgactcagttgcaaggaagcgagtcgtacaaggagtgccttgcactcttgggtcgtgttcacgctgcgatgaagatggtgagaattggcttagtagtgccccagctgcaatacagaatgtacggtagcctcatcaaccaaatggcccaagtagcacaaaactacgaccgagaattcaagcaattcaaattattcatcatccaaaatcaaatccttggcagctatttgctgcagcagaacagggcatttgctgagagggagctgcagatggagagctttcatgctgctgtcatttctcaaagaagggaggagttggacaatacattcgcaaagatggaccgattgagcgggcaaatggaggcagagagtagtgcaatggagcaagccaaaaaggaaatggacgaaggattgaggcagttccagaataggcaagttgcgaacgccctctttgccgttcttagcgctgtagctcagattgggcttgcattccttacggctggtgcaacggctcctggagctgtggcgtcggcggggcaagctgtgagcatagcaggtcaggcggcgcaaggtctgcgaagggtggtggaaattctagagcagctggaggctgtgatggaggttgtggctgctgtgaaggacctcgtggattcattggaacaggtaggtcagattgtggacgcaccggtgatgccggaattgccctcagaggcggactggtccatttttgtgaacgaggtggaggccgtggcagagggcatgccaacggaagtctcggaggttccggtgtggagggccaagtgcaagaatgtggctgcactgggtcgggagatgagcatcacggcagtacagatgtcggagctgcagtatgacatctgggtgcaaggcatgatgcgggatatggctcgaagccaggcagacaggctggccgcaattcaacccgcggaccttaccaactatttggagatggctacccagatggatatgcggactacgaggatgctgctggggctcctcaacatattgcgcatccagaatgcggcgctcaggtacgagtatcttctaatgcccacggagctcacaacatggccactgggtatggataccgtgggtgacttgctcatcgcgcaggagaatgctgcactgataggattaatgcagctagggccctcatctgatttcacgagcaggcatgtggtgaaagacatacctgtgaacttgctgctcgatggcgaggattgggagtttgagattcctgtgcaagctggcatgtccagcttcccttccagctggtctcgcgtccgtattcggcacctggagatgcactttgtgaaggaggccagcggtattggtggtgagattatccaccagcctaccacccagactgggaccgtttacatccttctgcagggttccactatcttccatgaccgcagaagagaccaggtgttgccttttcaggccgctgctccgctcaactaccattacgcgtaccgcctcgacaccggcgactccactctcacaaacgaaccctctgaacagtttgccaacaagttcatgcagatgacacccttcacccgttggaggcttcgtctgtctgcgtccgcaaaagagaatgcaggattagcctttcccacggctacagcacttgactccactacccagattgtcatcactttccatgttacggccatcagacaaattgactggcggcacgacgaagag

SEQ ID NO: 215 - DNA, 2601 bp, synthetic construct
  misc_feature 1..2601: note = Synthetic
  source 1..2601: mol_type = other DNA
atggctctcgtggattacggcaagcttttcgaggatctgaaccagataagcatgggtgtactggatcgggtagagttttcagaggtgatggtgatccacaggatgtatgtgaggctagctgatctgaatgtggggcagctcgagggagccgagaaagtgatgcgcttgtatgttttttgcgacattatcgagctaccagtcgtggaatggcggtggccgccgcaaataccaggatcggtgacggtgatcatattgtgtcgtcttcttcaatggccaactgatgggaggcagtcggacaccgagctccacctgacattcatgaagttgcatgccatacaacgagaggaaaatcggtgggagataaccgcagcagatggcatgaactggggagtttacatacacgcagaggaagtacaggttggcgtgctgacaatgtcatggtcttcggtacttagagtttcggcacttcgctctgttataacctccggctttcgcgccgttagtgtgtttgaggtaccgggaagtgtaaggtccacccttggagctactttaaggcccgatcacgccttatatagtacaactatgcaagccacacccaacgcatcgcatattagtgcttttaaccttcgcatagtttccccgtcggcatatcgtgtttgtcctctccaaaatgacacagatacctacttaggtattccagcagacgtggcggcagttcttccagtagacgtggtgactgatcctaacatcttgctgggcatgcagacaacggtacacattgcggagctagtcaaggcatgtcatccgtcacccgatgttgtgagcgctgtaggggagcacctgaactggctcaacaaactcttactcccacttaaggaatcgactcagttgcaaggaagcgagtcgtacaaggagtgccttgcactcttgggtcgtgttcacgctgcgatgaagatggtgagaattggcttagtagtgccccagctgcaatacagaatgtacggtagcctcatcaaccaaatggcccaagtagcacaaaactacgaccgagaattcaagcaattcaaattattcatcatccaaaatcaaatccttggcagctatttgctgcagcagaacagggcatttgctgagagggagctgcagatggagagctttcatgctgctgtcatttctcaaagaagggaggagttggacaatacattcgcaaagatggaccgattgagcgggcaaatggaggcagagagtagtgcaatggagcaagccaaaaaggaaatggacgaaggattgaggcagttccagaataggcaagttgcgaacgccctctttgccgttcttagcgctgtagctcagattgggcttgcattccttacggctggtgcaacggctcctggagctgtggcgtcggcggggcaagctgtgagcatagcaggtcaggcggcgcaaggtctgcgaagggtggtggaaattctagagcagctggaggctgtgatggaggttgtggctgctgtgaaggacctcgtggattcattggaacaggtaggtcagattgtggacgcaccggtgatgccggaattgccctcagaggcggactggtccatttttgtgaacgaggtggaggccgtggcagagggcatgccaacggaagtctcggaggttccggtgtggagggccaagtgcaagaatgtggctgcactgggtcgggagatgagcatcacggcagtacagatgtcggagctgcagtatgacatctgggtgcaaggcatgatgcgggatatggctcgaagccaggcagacaggctggccgcaattcaacccgcggaccttaccaactatttggagatggctacccagatggatatgcggactacgaggatgctgctggggctcctcaacatattgcgcatccagaatgcggcgctcaggtacgagtatcttctaatgcccacggagctcacaacatggccactgggtatggataccgtgggtgacttgctcatcgcgcaggagaatgctgcactgataggattaatgcagctagggccctcatctgatttcacgagcaggcatgtggtgaaagacatacctgtgaacttgctgctcgatggcgaggattgggagtttgagattcctgtgcaagctggcatgtccagcttcccttccagctggtctcgcgtccgtattcggcacctggagatgcactttgtgaaggaggccagcggtattggtggtgagattatccaccagcctaccacccagactgggaccgtttacatccttctgcagggttccactatcttccatgaccgcagaagagaccaggtgttgccttttcaggccgctgctccgctcaactaccattacgcgtaccgcctcgacaccggcgactccactctcacaaacgaaccctctgaacagtttgccaacaagttcatgcagatgacacccttcacccgttggaggcttcgtctgtctgcgtccgcaaaagagaatgcaggattagcctttcccacggctacagcacttgactccactacccagattgtcatcactttccatgttacggccatcagacaaattgactggcggcacgacgaagag

SEQ ID NO: 216 - DNA, 2601 bp, synthetic construct
  misc_feature 1..2601: note = Synthetic
  source 1..2601: mol_type = other DNA
atggctctcgtggattacggcaagcttttcgaggatctgaaccagataagcatgggtgtactggatcgggtagagttttcagaggtgatggtgatccacaggatgtatgtgaggctagctgatctgaatgtggggcagctcgagggagccgagaaagtgatgcggttgtatgttttttgcgacattctcgtgctaccagtcgtggaatggcggtggccgccgcaaataccaggatcggtgacggtgatcatattgtgtcgtcttcttcaatggccaactgatgggaggcagtcggacaccgagctccacctgacattcatgaagttgcatgccatacaacgagaggaaaatcggtgggagataaccgcagcagatggcatgaactggggagtttacatacacgcagaggaagtacaggttggcgtgctgacaatgtcatggtcttcggtacttagagtttcggcacttcgctctgttataacctccggctttcgcgccgttagtgtgtttgaggtaccgggaagtgtaaggtccacccttggagctactttaaggcccgatcacgccttatatagtacaactatgcaagccacacccaacgcatcgcatattagtgcttttaaccttcgcatagtttccccgtcggcatatcgtgtttgtcctctccaaaatgacacagatacctacttaggtattccagcagacgtggcggcagttcttccagtagacgtggtgactgatcctaacatcttgctgggcatgcagacaacggtacacattgcggagctagtcaaggcatgtcatccgtcacccgatgttgtgagcgctgtaggggagcacctgaactggctcaacaaactcttactcccacttaaggaatcgactcagttgcaaggaagcgagtcgtacaaggagtgccttgcactcttgggtcgtgttcacgctgcgatgaagatggtgagaattggcttagtagtgccccagctgcaatacagaatgtacggtagcctcatcaaccaaatggcccaagtagcacaaaactacgaccgagaattcaagcaattcaaattattcatcatccaaaatcaaatccttggcagctatttgctgcagcagaacagggcatttgctgagagggagctgcagatggagagctttcatgctgctgtcatttctcaaagaagggaggagttggacaatacattcgcaaagatggaccgattgagcgggcaaatggaggcagagagtagtgcaatggagcaagccaaaaaggaaatggacgaaggattgaggcagttccagaataggcaagttgcgaacgccctctttgccgttcttagcgctgtagctcagattgggcttgcattccttacggctggtgcaacggctcctggagctgtggcgtcggcggggcaagctgtgagcatagcaggtcaggcggcgcaaggtctgcgaagggtggtggaaattctagagcagctggaggctgtgatggaggttgtggctgctgtgaaggacctcgtggattcattggaacaggtaggtcagattgtggacgcaccggtgatgccggaattgccctcagaggcggactggtccatttttgtgaacgaggtggaggccgtggcagagggcatgccaacggaagtctcggaggttccggtgtggagggccaagtgcaagaatgtggctgcactgggtcgggagatgagcatcacggcagtacagatgtcggagctgcagtatgacatctgggtgcaaggcatgatgcgggatatggctcgaagccaggcagacaggctggccgcaattcaacccgcggaccttaccaactatttggagatggctacccagatggatatgcggactacgaggatgctgctggggctcctcaacatattgcgcatccagaatgcggcgctcaggtacgagtatcttctaatgcccacggagctcacaacatggccactgggtatggataccgtgggtgacttgctcatcgcgcaggagaatgctgcactgataggattaatgcagctagggccctcatctgatttcacgagcaggcatgtggtgaaagacatacctgtgaacttgctgctcgatggcgaggattgggagtttgagattcctgtgcaagctggcatgtccagcttcccttccagctggtctcgcgtccgtattcggcacctggagatgcactttgtgaaggaggccagcggtattggtggtgagattatccaccagcctaccacccagactgggaccgtttacatccttctgcagggttccactatcttccatgaccgcagaagagaccaggtgttgccttttcaggccgctgctccgctcaactaccattacgcgtaccgcctcgacaccggcgactccactctcacaaacgaaccctctgaacagtttgccaacaagttcatgcagatgacacccttcacccgttggaggcttcgtctgtctgcgtccgcaaaagagaatgcaggattagcctttcccacggctacagcacttgactccactacccagattgtcatcactttccatgttacggccatcagacaaattgactggcggcacgacgaagag

SEQ ID NO: 217 - DNA, 2601 bp, synthetic construct
  misc_feature 1..2601: note = Synthetic
  source 1..2601: mol_type = other DNA
atggctctcgtggattacggcaagcttttcgaggatctgaaccagataagcatgggtgtactggatcgggtagagttttcagaggtgatggtgatccacaggatgtatgtgaggctagctgatctgaatgtggggcagctcgagggagccgagaaagtgatgcggttgtatgtttttagcgacattatcgtgctaccagtcgtggaatggcggtggccgccgcaaataccaggatcggtgacggtgatcatattgtgtcgtcttcttcaatggccaactgatgggaggcagtcggacaccgagctccacctgacattcatgaagttgcatgccatacaacgagaggaaaatcggtgggagataaccgcagcagatggcatgaactggggagtttacatacacgcagaggaagtacaggttggcgtgctgacaatgtcatggtcttcggtacttagagtttcggcacttcgctctgttataacctccggctttcgcgccgttagtgtgtttgaggtaccgggaagtgtaaggtccacccttggagctactttaaggcccgatcacgccttatatagtacaactatgcaagccacacccaacgcatcgcatattagtgcttttaaccttcgcatagtttccccgtcggcatatcgtgtttgtcctctccaaaatgacacagatacctacttaggtattccagcagacgtggcggcagttcttccagtagacgtggtgactgatcctaacatcttgctgggcatgcagacaacggtacacattgcggagctagtcaaggcatgtcatccgtcacccgatgttgtgagcgctgtaggggagcacctgaactggctcaacaaactcttactcccacttaaggaatcgactcagttgcaaggaagcgagtcgtacaaggagtgccttgcactcttgggtcgtgttcacgctgcgatgaagatggtgagaattggcttagtagtgccccagctgcaatacagaatgtacggtagcctcatcaaccaaatggcccaagtagcacaaaactacgaccgagaattcaagcaattcaaattattcatcatccaaaatcaaatccttggcagctatttgctgcagcagaacagggcatttgctgagagggagctgcagatggagagctttcatgctgctgtcatttctcaaagaagggaggagttggacaatacattcgcaaagatggaccgattgagcgggcaaatggaggcagagagtagtgcaatggagcaagccaaaaaggaaatggacgaaggattgaggcagttccagaataggcaagttgcgaacgccctctttgccgttcttagcgctgtagctcagattgggcttgcattccttacggctggtgcaacggctcctggagctgtggcgtcggcggggcaagctgtgagcatagcaggtcaggcggcgcaaggtctgcgaagggtggtggaaattctagagcagctggaggctgtgatggaggttgtggctgctgtgaaggacctcgtggattcattggaacaggtaggtcagattgtggacgcaccggtgatgccggaattgccctcagaggcggactggtccatttttgtgaacgaggtggaggccgtggcagagggcatgccaacggaagtctcggaggttccggtgtggagggccaagtgcaagaatgtggctgcactgggtcgggagatgagcatcacggcagtacagatgtcggagctgcagtatgacatctgggtgcaaggcatgatgcgggatatggctcgaagccaggcagacaggctggccgcaattcaacccgcggaccttaccaactatttggagatggctacccagatggatatgcggactacgaggatgctgctggggctcctcaacatattgcgcatccagaatgcggcgctcaggtacgagtatcttctaatgcccacggagctcacaacatggccactgggtatggataccgtgggtgacttgctcatcgcgcaggagaatgctgcactgataggattaatgcagctagggccctcatctgatttcacgagcaggcatgtggtgaaagacatacctgtgaacttgctgctcgatggcgaggattgggagtttgagattcctgtgcaagctggcatgtccagcttcccttccagctggtctcgcgtccgtattcggcacctggagatgcactttgtgaaggaggccagcggtattggtggtgagattatccaccagcctaccacccagactgggaccgtttacatccttctgcagggttccactatcttccatgaccgcagaagagaccaggtgttgccttttcaggccgctgctccgctcaactaccattacgcgtaccgcctcgacaccggcgactccactctcacaaacgaaccctctgaacagtttgccaacaagttcatgcagatgacacccttcacccgttggaggcttcgtctgtctgcgtccgcaaaagagaatgcaggattagcctttcccacggctacagcacttgactccactacccagattgtcatcactttccatgttacggccatcagacaaattgactggcggcacgacgaagag

SEQ ID NO: 218 - DNA, 2601 bp, synthetic construct
  misc_feature 1..2601: note = Synthetic
  source 1..2601: mol_type = other DNA
atggctctcgtggattacggcaagcttttcgaggatctgaaccagataagcatgggtgtactggatcgggtagagttttcagaggtgatggtgatccacaggatgtatgtgaggctagctgatctgaatgtggggcagctcgagggagccgagaaagtgaggcacttgtatatttttgccgacattatcgagctaccagtcgtggaatggcggtggccgccgcaaataccaggatcggtgacggtgatcatattgtgtcgtcttcttcaatggccaactgatgggaggcagtcggacaccgagctccacctgacattcatgaagttgcatgccatacaacgagaggaaaatcggtgggagataaccgcagcagatggcatgaactggggagtttacatacacgcagaggaagtacaggttggcgtgctgacaatgtcatggtcttcggtacttagagtttcggcacttcgctctgttataacctccggctttcgcgccgttagtgtgtttgaggtaccgggaagtgtaaggtccacccttggagctactttaaggcccgatcacgccttatatagtacaactatgcaagccacacccaacgcatcgcatattagtgcttttaaccttcgcatagtttccccgtcggcatatcgtgtttgtcctctccaaaatgacacagatacctacttaggtattccagcagacgtggcggcagttcttccagtagacgtggtgactgatcctaacatcttgctgggcatgcagacaacggtacacattgcggagctagtcaaggcatgtcatccgtcacccgatgttgtgagcgctgtaggggagcacctgaactggctcaacaaactcttactcccacttaaggaatcgactcagttgcaaggaagcgagtcgtacaaggagtgccttgcactcttgggtcgtgttcacgctgcgatgaagatggtgagaattggcttagtagtgccccagctgcaatacagaatgtacggtagcctcatcaaccaaatggcccaagtagcacaaaactacgaccgagaattcaagcaattcaaattattcatcatccaaaatcaaatccttggcagctatttgctgcagcagaacagggcatttgctgagagggagctgcagatggagagctttcatgctgctgtcatttctcaaagaagggaggagttggacaatacattcgcaaagatggaccgattgagcgggcaaatggaggcagagagtagtgcaatggagcaagccaaaaaggaaatggacgaaggattgaggcagttccagaataggcaagttgcgaacgccctctttgccgttcttagcgctgtagctcagattgggcttgcattccttacggctggtgcaacggctcctggagctgtggcgtcggcggggcaagctgtgagcatagcaggtcaggcggcgcaaggtctgcgaagggtggtggaaattctagagcagctggaggctgtgatggaggttgtggctgctgtgaaggacctcgtggattcattggaacaggtaggtcagattgtggacgcaccggtgatgccggaattgccctcagaggcggactggtccatttttgtgaacgaggtggaggccgtggcagagggcatgccaacggaagtctcggaggttccggtgtggagggccaagtgcaagaatgtggctgcactgggtcgggagatgagcatcacggcagtacagatgtcggagctgcagtatgacatctgggtgcaaggcatgatgcgggatatggctcgaagccaggcagacaggctggccgcaattcaacccgcggaccttaccaactatttggagatggctacccagatggatatgcggactacgaggatgctgctggggctcctcaacatattgcgcatccagaatgcggcgctcaggtacgagtatcttctaatgcccacggagctcacaacatggccactgggtatggataccgtgggtgacttgctcatcgcgcaggagaatgctgcactgataggattaatgcagctagggccctcatctgatttcacgagcaggcatgtggtgaaagacatacctgtgaacttgctgctcgatggcgaggattgggagtttgagattcctgtgcaagctggcatgtccagcttcccttccagctggtctcgcgtccgtattcggcacctggagatgcactttgtgaaggaggccagcggtattggtggtgagattatccaccagcctaccacccagactgggaccgtttacatccttctgcagggttccactatcttccatgaccgcagaagagaccaggtgttgccttttcaggccgctgctccgctcaactaccattacgcgtaccgcctcgacaccggcgactccactctcacaaacgaaccctctgaacagtttgccaacaagttcatgcagatgacacccttcacccgttggaggcttcgtctgtctgcgtccgcaaaagagaatgcaggattagcctttcccacggctacagcacttgactccactacccagattgtcatcactttccatgttacggccatcagacaaattgactggcggcacgacgaagag

SEQ ID NO: 219 - DNA, 2601 bp, synthetic construct
  misc_feature 1..2601: note = Synthetic
  source 1..2601: mol_type = other DNA
atggctctcgtggattacggcaagcttttcgaggatctgaaccagataagcatgggtgtactggatcgggtagagttttcagaggtgatggtgatccacaggatgtatgtgaggctagctgatctgaatgtggggcagctcgagggagccgagaaagtgaggcacttgtatatttttgccgacgttgtcgagctaccagtcgtggaatggcggtggccgccgcaaataccaggatcggtgacggtgatcatattgtgtcgtcttcttcaatggccaactgatgggaggcagtcggacaccgagctccacctgacattcatgaagttgcatgccatacaacgagaggaaaatcggtgggagataaccgcagcagatggcatgaactggggagtttacatacacgcagaggaagtacaggttggcgtgctgacaatgtcatggtcttcggtacttagagtttcggcacttcgctctgttataacctccggctttcgcgccgttagtgtgtttgaggtaccgggaagtgtaaggtccacccttggagctactttaaggcccgatcacgccttatatagtacaactatgcaagccacacccaacgcatcgcatattagtgcttttaaccttcgcatagtttccccgtcggcatatcgtgtttgtcctctccaaaatgacacagatacctacttaggtattccagcagacgtggcggcagttcttccagtagacgtggtgactgatcctaacatcttgctgggcatgcagacaacggtacacattgcggagctagtcaaggcatgtcatccgtcacccgatgttgtgagcgctgtaggggagcacctgaactggctcaacaaactcttactcccacttaaggaatcgactcagttgcaaggaagcgagtcgtacaaggagtgccttgcactcttgggtcgtgttcacgctgcgatgaagatggtgagaattggcttagtagtgccccagctgcaatacagaatgtacggtagcctcatcaaccaaatggcccaagtagcacaaaactacgaccgagaattcaagcaattcaaattattcatcatccaaaatcaaatccttggcagctatttgctgcagcagaacagggcatttgctgagagggagctgcagatggagagctttcatgctgctgtcatttctcaaagaagggaggagttggacaatacattcgcaaagatggaccgattgagcgggcaaatggaggcagagagtagtgcaatggagcaagccaaaaaggaaatggacgaaggattgaggcagttccagaataggcaagttgcgaacgccctctttgccgttcttagcgctgtagctcagattgggcttgcattccttacggctggtgcaacggctcctggagctgtggcgtcggcggggcaagctgtgagcatagcaggtcaggcggcgcaaggtctgcgaagggtggtggaaattctagagcagctggaggctgtgatggaggttgtggctgctgtgaaggacctcgtggattcattggaacaggtaggtcagattgtggacgcaccggtgatgccggaattgccctcagaggcggactggtccatttttgtgaacgaggtggaggccgtggcagagggcatgccaacggaagtctcggaggttccggtgtggagggccaagtgcaagaatgtggctgcactgggtcgggagatgagcatcacggcagtacagatgtcggagctgcagtatgacatctgggtgcaaggcatgatgcgggatatggctcgaagccaggcagacaggctggccgcaattcaacccgcggaccttaccaactatttggagatggctacccagatggatatgcggactacgaggatgctgctggggctcctcaacatattgcgcatccagaatgcggcgctcaggtacgagtatcttctaatgcccacggagctcacaacatggccactgggtatggataccgtgggtgacttgctcatcgcgcaggagaatgctgcactgataggattaatgcagctagggccctcatctgatttcacgagcaggcatgtggtgaaagacatacctgtgaacttgctgctcgatggcgaggattgggagtttgagattcctgtgcaagctggcatgtccagcttcccttccagctggtctcgcgtccgtattcggcacctggagatgcactttgtgaaggaggccagcggtattggtggtgagattatccaccagcctaccacccagactgggaccgtttacatccttctgcagggttccactatcttccatgaccgcagaagagaccaggtgttgccttttcaggccgctgctccgctcaactaccattacgcgtaccgcctcgacaccggcgactccactctcacaaacgaaccctctgaacagtttgccaacaagttcatgcagatgacacccttcacccgttggaggcttcgtctgtctgcgtccgcaaaagagaatgcaggattagcctttcccacggctacagcacttgactccactacccagattgtcatcactttccatgttacggccatcagacaaattgactggcggcacgacgaagag

SEQ ID NO: 220 - DNA, 2601 bp, synthetic construct
  misc_feature 1..2601: note = Synthetic
  source 1..2601: mol_type = other DNA
atggctctcgtggattacggcaagcttttcgaggatctgaaccagataagcatgggtgtactggatcgggtagagttttcagaggtgatggtgatccacaggatgtatgtgaggctagctgatctgaatgtggggcagctcgagggagccgagaaagtgaggcacttgtatattttttgcgacgttatcgagctaccagtcgtggaatggcggtggccgccgcaaataccaggatcggtgacggtgatcatattgtgtcgtcttcttcaatggccaactgatgggaggcagtcggacaccgagctccacctgacattcatgaagttgcatgccatacaacgagaggaaaatcggtgggagataaccgcagcagatggcatgaactggggagtttacatacacgcagaggaagtacaggttggcgtgctgacaatgtcatggtcttcggtacttagagtttcggcacttcgctctgttataacctccggctttcgcgccgttagtgtgtttgaggtaccgggaagtgtaaggtccacccttggagctactttaaggcccgatcacgccttatatagtacaactatgcaagccacacccaacgcatcgcatattagtgcttttaaccttcgcatagtttccccgtcggcatatcgtgtttgtcctctccaaaatgacacagatacctacttaggtattccagcagacgtggcggcagttcttccagtagacgtggtgactgatcctaacatcttgctgggcatgcagacaacggtacacattgcggagctagtcaaggcatgtcatccgtcacccgatgttgtgagcgctgtaggggagcacctgaactggctcaacaaactcttactcccacttaaggaatcgactcagttgcaaggaagcgagtcgtacaaggagtgccttgcactcttgggtcgtgttcacgctgcgatgaagatggtgagaattggcttagtagtgccccagctgcaatacagaatgtacggtagcctcatcaaccaaatggcccaagtagcacaaaactacgaccgagaattcaagcaattcaaattattcatcatccaaaatcaaatccttggcagctatttgctgcagcagaacagggcatttgctgagagggagctgcagatggagagctttcatgctgctgtcatttctcaaagaagggaggagttggacaatacattcgcaaagatggaccgattgagcgggcaaatggaggcagagagtagtgcaatggagcaagccaaaaaggaaatggacgaaggattgaggcagttccagaataggcaagttgcgaacgccctctttgccgttcttagcgctgtagctcagattgggcttgcattccttacggctggtgcaacggctcctggagctgtggcgtcggcggggcaagctgtgagcatagcaggtcaggcggcgcaaggtctgcgaagggtggtggaaattctagagcagctggaggctgtgatggaggttgtggctgctgtgaaggacctcgtggattcattggaacaggtaggtcagattgtggacgcaccggtgatgccggaattgccctcagaggcggactggtccatttttgtgaacgaggtggaggccgtggcagagggcatgccaacggaagtctcggaggttccggtgtggagggccaagtgcaagaatgtggctgcactgggtcgggagatgagcatcacggcagtacagatgtcggagctgcagtatgacatctgggtgcaaggcatgatgcgggatatggctcgaagccaggcagacaggctggccgcaattcaacccgcggaccttaccaactatttggagatggctacccagatggatatgcggactacgaggatgctgctggggctcctcaacatattgcgcatccagaatgcggcgctcaggtacgagtatcttctaatgcccacggagctcacaacatggccactgggtatggataccgtgggtgacttgctcatcgcgcaggagaatgctgcactgataggattaatgcagctagggccctcatctgatttcacgagcaggcatgtggtgaaagacatacctgtgaacttgctgctcgatggcgaggattgggagtttgagattcctgtgcaagctggcatgtccagcttcccttccagctggtctcgcgtccgtattcggcacctggagatgcactttgtgaaggaggccagcggtattggtggtgagattatccaccagcctaccacccagactgggaccgtttacatccttctgcagggttccactatcttccatgaccgcagaagagaccaggtgttgccttttcaggccgctgctccgctcaactaccattacgcgtaccgcctcgacaccggcgactccactctcacaaacgaaccctctgaacagtttgccaacaagttcatgcagatgacacccttcacccgttggaggcttcgtctgtctgcgtccgcaaaagagaatgcaggattagcctttcccacggctacagcacttgactccactacccagattgtcatcactttccatgttacggccatcagacaaattgactggcggcacgacgaagag

SEQ ID NO: 221 - DNA, 2601 bp, synthetic construct
  misc_feature 1..2601: note = Synthetic
  source 1..2601: mol_type = other DNA
atggctctcgtggattacggcaagcttttcgaggatctgaaccagataagcatgggtgtactggatcgggtagagttttcagaggtgatggtgatccacaggatgtatgtgaggctagctgatctgaatgtggggcagctcgagggagccgagaaagtgaggcacttgtatattttttccgacgttatcgagctaccagtcgtggaatggcggtggccgccgcaaataccaggatcggtgacggtgatcatattgtgtcgtcttcttcaatggccaactgatgggaggcagtcggacaccgagctccacctgacattcatgaagttgcatgccatacaacgagaggaaaatcggtgggagataaccgcagcagatggcatgaactggggagtttacatacacgcagaggaagtacaggttggcgtgctgacaatgtcatggtcttcggtacttagagtttcggcacttcgctctgttataacctccggctttcgcgccgttagtgtgtttgaggtaccgggaagtgtaaggtccacccttggagctactttaaggcccgatcacgccttatatagtacaactatgcaagccacacccaacgcatcgcatattagtgcttttaaccttcgcatagtttccccgtcggcatatcgtgtttgtcctctccaaaatgacacagatacctacttaggtattccagcagacgtggcggcagttcttccagtagacgtggtgactgatcctaacatcttgctgggcatgcagacaacggtacacattgcggagctagtcaaggcatgtcatccgtcacccgatgttgtgagcgctgtaggggagcacctgaactggctcaacaaactcttactcccacttaaggaatcgactcagttgcaaggaagcgagtcgtacaaggagtgccttgcactcttgggtcgtgttcacgctgcgatgaagatggtgagaattggcttagtagtgccccagctgcaatacagaatgtacggtagcctcatcaaccaaatggcccaagtagcacaaaactacgaccgagaattcaagcaattcaaattattcatcatccaaaatcaaatccttggcagctatttgctgcagcagaacagggcatttgctgagagggagctgcagatggagagctttcatgctgctgtcatttctcaaagaagggaggagttggacaatacattcgcaaagatggaccgattgagcgggcaaatggaggcagagagtagtgcaatggagcaagccaaaaaggaaatggacgaaggattgaggcagttccagaataggcaagttgcgaacgccctctttgccgttcttagcgctgtagctcagattgggcttgcattccttacggctggtgcaacggctcctggagctgtggcgtcggcggggcaagctgtgagcatagcaggtcaggcggcgcaaggtctgcgaagggtggtggaaattctagagcagctggaggctgtgatggaggttgtggctgctgtgaaggacctcgtggattcattggaacaggtaggtcagattgtggacgcaccggtgatgccggaattgccctcagaggcggactggtccatttttgtgaacgaggtggaggccgtggcagagggcatgccaacggaagtctcggaggttccggtgtggagggccaagtgcaagaatgtggctgcactgggtcgggagatgagcatcacggcagtacagatgtcggagctgcagtatgacatctgggtgcaaggcatgatgcgggatatggctcgaagccaggcagacaggctggccgcaattcaacccgcggaccttaccaactatttggagatggctacccagatggatatgcggactacgaggatgctgctggggctcctcaacatattgcgcatccagaatgcggcgctcaggtacgagtatcttctaatgcccacggagctcacaacatggccactgggtatggataccgtgggtgacttgctcatcgcgcaggagaatgctgcactgataggattaatgcagctagggccctcatctgatttcacgagcaggcatgtggtgaaagacatacctgtgaacttgctgctcgatggcgaggattgggagtttgagattcctgtgcaagctggcatgtccagcttcccttccagctggtctcgcgtccgtattcggcacctggagatgcactttgtgaaggaggccagcggtattggtggtgagattatccaccagcctaccacccagactgggaccgtttacatccttctgcagggttccactatcttccatgaccgcagaagagaccaggtgttgccttttcaggccgctgctccgctcaactaccattacgcgtaccgcctcgacaccggcgactccactctcacaaacgaaccctctgaacagtttgccaacaagttcatgcagatgacacccttcacccgttggaggcttcgtctgtctgcgtccgcaaaagagaatgcaggattagcctttcccacggctacagcacttgactccactacccagattgtcatcactttccatgttacggccatcagacaaattgactggcggcacgacgaagag

SEQ ID NO: 222 - DNA, 2601 bp, synthetic construct
  misc_feature 1..2601: note = Synthetic
  source 1..2601: mol_type = other DNA
atggctctcgtggattacggcaagcttttcgaggatctgaaccagataagcatgggtgtactggatcgggtagagttttcagaggtgatggtgatccacaggatgtatgtgaggctagctgatctgaatgtggggcagctcgagggagccgagaaagtgaggcacttgtatatttttagcgacgttgtcgagctaccagtcgtggaatggcggtggccgccgcaaataccaggatcggtgacggtgatcatattgtgtcgtcttcttcaatggccaactgatgggaggcagtcggacaccgagctccacctgacattcatgaagttgcatgccatacaacgagaggaaaatcggtgggagataaccgcagcagatggcatgaactggggagtttacatacacgcagaggaagtacaggttggcgtgctgacaatgtcatggtcttcggtacttagagtttcggcacttcgctctgttataacctccggctttcgcgccgttagtgtgtttgaggtaccgggaagtgtaaggtccacccttggagctactttaaggcccgatcacgccttatatagtacaactatgcaagccacacccaacgcatcgcatattagtgcttttaaccttcgcatagtttccccgtcggcatatcgtgtttgtcctctccaaaatgacacagatacctacttaggtattccagcagacgtggcggcagttcttccagtagacgtggtgactgatcctaacatcttgctgggcatgcagacaacggtacacattgcggagctagtcaaggcatgtcatccgtcacccgatgttgtgagcgctgtaggggagcacctgaactggctcaacaaactcttactcccacttaaggaatcgactcagttgcaaggaagcgagtcgtacaaggagtgccttgcactcttgggtcgtgttcacgctgcgatgaagatggtgagaattggcttagtagtgccccagctgcaatacagaatgtacggtagcctcatcaaccaaatggcccaagtagcacaaaactacgaccgagaattcaagcaattcaaattattcatcatccaaaatcaaatccttggcagctatttgctgcagcagaacagggcatttgctgagagggagctgcagatggagagctttcatgctgctgtcatttctcaaagaagggaggagttggacaatacattcgcaaagatggaccgattgagcgggcaaatggaggcagagagtagtgcaatggagcaagccaaaaaggaaatggacgaaggattgaggcagttccagaataggcaagttgcgaacgccctctttgccgttcttagcgctgtagctcagattgggcttgcattccttacggctggtgcaacggctcctggagctgtggcgtcggcggggcaagctgtgagcatagcaggtcaggcggcgcaaggtctgcgaagggtggtggaaattctagagcagctggaggctgtgatggaggttgtggctgctgtgaaggacctcgtggattcattggaacaggtaggtcagattgtggacgcaccggtgatgccggaattgccctcagaggcggactggtccatttttgtgaacgaggtggaggccgtggcagagggcatgccaacggaagtctcggaggttccggtgtggagggccaagtgcaagaatgtggctgcactgggtcgggagatgagcatcacggcagtacagatgtcggagctgcagtatgacatctgggtgcaaggcatgatgcgggatatggctcgaagccaggcagacaggctggccgcaattcaacccgcggaccttaccaactatttggagatggctacccagatggatatgcggactacgaggatgctgctggggctcctcaacatattgcgcatccagaatgcggcgctcaggtacgagtatcttctaatgcccacggagctcacaacatggccactgggtatggataccgtgggtgacttgctcatcgcgcaggagaatgctgcactgataggattaatgcagctagggccctcatctgatttcacgagcaggcatgtggtgaaagacatacctgtgaacttgctgctcgatggcgaggattgggagtttgagattcctgtgcaagctggcatgtccagcttcccttccagctggtctcgcgtccgtattcggcacctggagatgcactttgtgaaggaggccagcggtattggtggtgagattatccaccagcctaccacccagactgggaccgtttacatccttctgcagggttccactatcttccatgaccgcagaagagaccaggtgttgccttttcaggccgctgctccgctcaactaccattacgcgtaccgcctcgacaccggcgactccactctcacaaacgaaccctctgaacagtttgccaacaagttcatgcagatgacacccttcacccgttggaggcttcgtctgtctgcgtccgcaaaagagaatgcaggattagcctttcccacggctacagcacttgactccactacccagattgtcatcactttccatgttacggccatcagacaaattgactggcggcacgacgaagag

SEQ ID NO: 223 - DNA, 2601 bp, synthetic construct
  misc_feature 1..2601: note = Synthetic
  source 1..2601: mol_type = other DNA
atggctctcgtggattacggcaagcttttcgaggatctgaaccagataagcatgggtgtactggatcgggtagagttttcagaggtgatggtgatccacaggatgtatgtgaggctagctgatctgaatgtggggcagctcgagggagccgagaaagtgaggcacttgtatgtttttaccgacgttctcgagctaccagtcgtggaatggcggtggccaccgcaaataccaggatcggtgacggtgatcatattgtgtcgtcttcttcaatggccaactgatgggaggcagtcggacaccgagctccacctgacattcatgaagttgcatgccatacaacgagaggaaaatcggtgggagataaccgcagcagatggcatgaactggggagtttacatacacgcagaggaagtacaggttggcgtgctgacaatgtcatggtcttcggtacttagagtttcggcacttcgctctgttataacctccggctttcgcgccgttagtgtgtttgaggtaccgggaagtgtaaggtccacccttggagctactttaaggcccgatcacgccttatatagtacaactatgcaagccacacccaacgcatcgcatattagtgcttttaaccttcgcatagtttccccgtcggcatatcgtgtttgtcctctccaaaatgacacagatacctacttaggtattccagcagacgtggcggcagttcttccagtagacgtggtgactgatcctaacatcttgctgggcatgcagacaacggtacacattgcggagctagtcaaggcatgtcatccgtcacccgatgttgtgagcgctgtaggggagcacctgaactggctcaacaaactcttactcccacttaaggaatcgactcagttgcaaggaagcgagtcgtacaaggagtgccttgcactcttgggtcgtgttcacgctgcgatgaagatggtgagaattggcttagtagtgccccagctgcaatacagaatgtacggtagcctcatcaaccaaatggcccaagtagcacaaaactacgaccgagaattcaagcaattcaaattattcatcatccaaaatcaaatccttggcagctatttgctgcagcagaacagggcatttgctgagagggagctgcagatggagagctttcatgctgctgtcatttctcaaagaagggaggagttggacaatacattcgcaaagatggaccgattgagcgggcaaatggaggcagagagtagtgcaatggagcaagccaaaaaggaaatggacgaaggattgaggcagttccagaataggcaagttgcgaacgccctctttgccgttcttagcgctgtagctcagattgggcttgcattccttacggctggtgcaacggctcctggagctgtggcgtcggcggggcaagctgtgagcatagcaggtcaggcggcgcaaggtctgcgaagggtggtggaaattctagagcagctggaggctgtgatggaggttgtggctgctgtgaaggacctcgtggattcattggaacaggtaggtcagattgtggacgcaccggtgatgccggaattgccctcagaggcggactggtccatttttgtgaacgaggtggaggccgtggcagagggcatgccaacggaagtctcggaggttccggtgtggagggccaagtgcaagaatgtggctgcactgggtcgggagatgagcatcacggcagtacagatgtcggagctgcagtatgacatctgggtgcaaggcatgatgcgggatatggctcgaagccaggcagacaggctggccgcaattcaacccgcggaccttaccaactatttggagatggctacccagatggatatgcggactacgaggatgctgctggggctcctcaacatattgcgcatccagaatgcggcgctcaggtacgagtatcttctaatgcccacggagctcacaacatggccactgggtatggataccgtgggtgacttgctcatcgcgcaggagaatgctgcactgataggattaatgcagctagggccctcatctgatttcacgagcaggcatgtggtgaaagacatacctgtgaacttgctgctcgatggcgaggattgggagtttgagattcctgtgcaagctggcatgtccagcttcccttccagctggtctcgcgtccgtattcggcacctggagatgcactttgtgaaggaggccagcggtattggtggtgagattatccaccagcctaccacccagactgggaccgtttacatccttctgcagggttccactatcttccatgaccgcagaagagaccaggtgttgccttttcaggccgctgctccgctcaactaccattacgcgtaccgcctcgacaccggcgactccactctcacaaacgaaccctctgaacagtttgccaacaagttcatgcagatgacacccttcacccgttggaggcttcgtctgtctgcgtccgcaaaagagaatgcaggattagcctttcccacggctacagcacttgactccactacccagattgtcatcactttccatgttacggccatcagacaaattgactggcggcacgacgaagag

SEQ ID NO: 224 - DNA, 2601 bp, synthetic construct
  misc_feature 1..2601: note = Synthetic
  source 1..2601: mol_type = other DNA
atggctctcgtggattacggcaagcttttcgaggatctgaaccagataagcatgggtgtactggatcgggtagagttttcagaggtgatggtgatccacaggatgtatgtgaggctagctgatctgaatgtggggcagctcgagggagccgagaaagtgaggcagttgtatattttttgcgacgttatcgtgctaccagtcgtggaatggcggtggccgccgcaaataccaggatcggtgacggtgatcatattgtgtcgtcttcttcaatggccaactgatgggaggcagtcggacaccgagctccacctgacattcatgaagttgcatgccatacaacgagaggaaaatcggtgggagataaccgcagcagatggcatgaactggggagtttacatacacgcagaggaagtacaggttggcgtgctgacaatgtcatggtcttcggtacttagagtttcggcacttcgctctgttataacctccggctttcgcgccgttagtgtgtttgaggtaccgggaagtgtaaggtccacccttggagctactttaaggcccgatcacgccttatatagtacaactatgcaagccacacccaacgcatcgcatattagtgcttttaaccttcgcatagtttccccgtcggcatatcgtgtttgtcctctccaaaatgacacagatacctacttaggtattccagcagacgtggcggcagttcttccagtagacgtggtgactgatcctaacatcttgctgggcatgcagacaacggtacacattgcggagctagtcaaggcatgtcatccgtcacccgatgttgtgagcgctgtaggggagcacctgaactggctcaacaaactcttactcccacttaaggaatcgactcagttgcaaggaagcgagtcgtacaaggagtgccttgcactcttgggtcgtgttcacgctgcgatgaagatggtgagaattggcttagtagtgccccagctgcaatacagaatgtacggtagcctcatcaaccaaatggcccaagtagcacaaaactacgaccgagaattcaagcaattcaaattattcatcatccaaaatcaaatccttggcagctatttgctgcagcagaacagggcatttgctgagagggagctgcagatggagagctttcatgctgctgtcatttctcaaagaagggaggagttggacaatacattcgcaaagatggaccgattgagcgggcaaatggaggcagagagtagtgcaatggagcaagccaaaaaggaaatggacgaaggattgaggcagttccagaataggcaagttgcgaacgccctctttgccgttcttagcgctgtagctcagattgggcttgcattccttacggctggtgcaacggctcctggagctgtggcgtcggcggggcaagctgtgagcatagcaggtcaggcggcgcaaggtctgcgaagggtggtggaaattctagagcagctggaggctgtgatggaggttgtggctgctgtgaaggacctcgtggattcattggaacaggtaggtcagattgtggacgcaccggtgatgccggaattgccctcagaggcggactggtccatttttgtgaacgaggtggaggccgtggcagagggcatgccaacggaagtctcggaggttccggtgtggagggccaagtgcaagaatgtggctgcactgggtcgggagatgagcatcacggcagtacagatgtcggagctgcagtatgacatctgggtgcaaggcatgatgcgggatatggctcgaagccaggcagacaggctggccgcaattcaacccgcggaccttaccaactatttggagatggctacccagatggatatgcggactacgaggatgctgctggggctcctcaacatattgcgcatccagaatgcggcgctcaggtacgagtatcttctaatgcccacggagctcacaacatggccactgggtatggataccgtgggtgacttgctcatcgcgcaggagaatgctgcactgataggattaatgcagctagggccctcatctgatttcacgagcaggcatgtggtgaaagacatacctgtgaacttgctgctcgatggcgaggattgggagtttgagattcctgtgcaagctggcatgtccagcttcccttccagctggtctcgcgtccgtattcggcacctggagatgcactttgtgaaggaggccagcggtattggtggtgagattatccaccagcctaccacccagactgggaccgtttacatccttctgcagggttccactatcttccatgaccgcagaagagaccaggtgttgccttttcaggccgctgctccgctcaactaccattacgcgtaccgcctcgacaccggcgactccactctcacaaacgaaccctctgaacagtttgccaacaagttcatgcagatgacacccttcacccgttggaggcttcgtctgtctgcgtccgcaaaagagaatgcaggattagcctttcccacggctacagcacttgactccactacccagattgtcatcactttccatgttacggccatcagacaaattgactggcggcacgacgaagag

SEQ ID NO: 225 - DNA, 2601 bp, synthetic construct
  misc_feature 1..2601: note = Synthetic
  source 1..2601: mol_type = other DNA
atggctctcgtggattacggcaagcttttcgaggatctgaaccagataagcatgggtgtactggatcgggtagagttttcagaggtgatggtgatccacaggatgtatgtgaggctagctgatctgaatgtggggcagctcgagggagccgagaaagtgaggcagttgtatatttttagcgacgttgtcgtgctaccagtcgtggaatggcggtggccgccgcaaataccaggatcggtgacggtgatcatattgtgtcgtcttcttcaatggccaactgatgggaggcagtcggacaccgagctccacctgacattcatgaagttgcatgccatacaacgagaggaaaatcggtgggagataaccgcagcagatggcatgaactggggagtttacatacacgcagaggaagtacaggttggcgtgctgacaatgtcatggtcttcggtacttagagtttcggcacttcgctctgttataacctccggctttcgcgccgttagtgtgtttgaggtaccgggaagtgtaaggtccacccttggagctactttaaggcccgatcacgccttatatagtacaactatgcaagccacacccaacgcatcgcatattagtgcttttaaccttcgcatagtttccccgtcggcatatcgtgtttgtcctctccaaaatgacacagatacctacttaggtattccagcagacgtggcggcagttcttccagtagacgtggtgactgatcctaacatcttgctgggcatgcagacaacggtacacattgcggagctagtcaaggcatgtcatccgtcacccgatgttgtgagcgctgtaggggagcacctgaactggctcaacaaactcttactcccacttaaggaatcgactcagttgcaaggaagcgagtcgtacaaggagtgccttgcactcttgggtcgtgttcacgctgcgatgaagatggtgagaattggcttagtagtgccccagctgcaatacagaatgtacggtagcctcatcaaccaaatggcccaagtagcacaaaactacgaccgagaattcaagcaattcaaattattcatcatccaaaatcaaatccttggcagctatttgctgcagcagaacagggcatttgctgagagggagctgcagatggagagctttcatgctgctgtcatttctcaaagaagggaggagttggacaatacattcgcaaagatggaccgattgagcgggcaaatggaggcagagagtagtgcaatggagcaagccaaaaaggaaatggacgaaggattgaggcagttccagaataggcaagttgcgaacgccctctttgccgttcttagcgctgtagctcagattgggcttgcattccttacggctggtgcaacggctcctggagctgtggcgtcggcggggcaagctgtgagcatagcaggtcaggcggcgcaaggtctgcgaagggtggtggaaattctagagcagctggaggctgtgatggaggttgtggctgctgtgaaggacctcgtggattcattggaacaggtaggtcagattgtggacgcaccggtgatgccggaattgccctcagaggcggactggtccatttttgtgaacgaggtggaggccgtggcagagggcatgccaacggaagtctcggaggttccggtgtggagggccaagtgcaagaatgtggctgcactgggtcgggagatgagcatcacggcagtacagatgtcggagctgcagtatgacatctgggtgcaaggcatgatgcgggatatggctcgaagccaggcagacaggctggccgcaattcaacccgcggaccttaccaactatttggagatggctacccagatggatatgcggactacgaggatgctgctggggctcctcaacatattgcgcatccagaatgcggcgctcaggtacgagtatcttctaatgcccacggagctcacaacatggccactgggtatggataccgtgggtgacttgctcatcgcgcaggagaatgctgcactgataggattaatgcagctagggccctcatctgatttcacgagcaggcatgtggtgaaagacatacctgtgaacttgctgctcgatggcgaggattgggagtttgagattcctgtgcaagctggcatgtccagcttcccttccagctggtctcgcgtccgtattcggcacctggagatgcactttgtgaaggaggccagcggtattggtggtgagattatccaccagcctaccacccagactgggaccgtttacatccttctgcagggttccactatcttccatgaccgcagaagagaccaggtgttgccttttcaggccgctgctccgctcaactaccattacgcgtaccgcctcgacaccggcgactccactctcacaaacgaaccctctgaacagtttgccaacaagttcatgcagatgacacccttcacccgttggaggcttcgtctgtctgcgtccgcaaaagagaatgcaggattagcctttcccacggctacagcacttgactccactacccagattgtcatcactttccatgttacggccatcagacaaattgactggcggcacgacgaagag

SEQ ID NO: 226 - DNA, 2601 bp, synthetic construct
  misc_feature 1..2601: note = Synthetic
  source 1..2601: mol_type = other DNA
atggctctcgtggattacggcaagcttttcgaggatctgaaccagataagcatgggtgtactggatcgggtagagttttcagaggtgatggtgatccacaggatgtatgtgaggctagctgatctgaatgtggggcagctcgagggagccgagaaagtgaggcagttgtatgttttttgcgacgttctcgtgctaccagtcgtggaatggcggtggccgccgcaaataccaggatcggtgacggtgatcatattgtgtcgtcttcttcaatggccaactgatgggaggcagtcggacaccgagctccacctgacattcatgaagttgcatgccatacaacgagaggaaaatcggtgggagataaccgcagcagatggcatgaactggggagtttacatacacgcagaggaagtacaggttggcgtgctgacaatgtcatggtcttcggtacttagagtttcggcacttcgctctgttataacctccggctttcgcgccgttagtgtgtttgaggtaccgggaagtgtaaggtccacccttggagctactttaaggcccgatcacgccttatatagtacaactatgcaagccacacccaacgcatcgcatattagtgcttttaaccttcgcatagtttccccgtcggcatatcgtgtttgtcctctccaaaatgacacagatacctacttaggtattccagcagacgtggcggcagttcttccagtagacgtggtgactgatcctaacatcttgctgggcatgcagacaacggtacacattgcggagctagtcaaggcatgtcatccgtcacccgatgttgtgagcgctgtaggggagcacctgaactggctcaacaaactcttactcccacttaaggaatcgactcagttgcaaggaagcgagtcgtacaaggagtgccttgcactcttgggtcgtgttcacgctgcgatgaagatggtgagaattggcttagtagtgccccagctgcaatacagaatgtacggtagcctcatcaaccaaatggcccaagtagcacaaaactacgaccgagaattcaagcaattcaaattattcatcatccaaaatcaaatccttggcagctatttgctgcagcagaacagggcatttgctgagagggagctgcagatggagagctttcatgctgctgtcatttctcaaagaagggaggagttggacaatacattcgcaaagatggaccgattgagcgggcaaatggaggcagagagtagtgcaatggagcaagccaaaaaggaaatggacgaaggattgaggcagttccagaataggcaagttgcgaacgccctctttgccgttcttagcgctgtagctcagattgggcttgcattccttacggctggtgcaacggctcctggagctgtggcgtcggcggggcaagctgtgagcatagcaggtcaggcggcgcaaggtctgcgaagggtggtggaaattctagagcagctggaggctgtgatggaggttgtggctgctgtgaaggacctcgtggattcattggaacaggtaggtcagattgtggacgcaccggtgatgccggaattgccctcagaggcggactggtccatttttgtgaacgaggtggaggccgtggcagagggcatgccaacggaagtctcggaggttccggtgtggagggccaagtgcaagaatgtggctgcactgggtcgggagatgagcatcacggcagtacagatgtcggagctgcagtatgacatctgggtgcaaggcatgatgcgggatatggctcgaagccaggcagacaggctggccgcaattcaacccgcggaccttaccaactatttggagatggctacccagatggatatgcggactacgaggatgctgctggggctcctcaacatattgcgcatccagaatgcggcgctcaggtacgagtatcttctaatgcccacggagctcacaacatggccactgggtatggataccgtgggtgacttgctcatcgcgcaggagaatgctgcactgataggattaatgcagctagggccctcatctgatttcacgagcaggcatgtggtgaaagacatacctgtgaacttgctgctcgatggcgaggattgggagtttgagattcctgtgcaagctggcatgtccagcttcccttccagctggtctcgcgtccgtattcggcacctggagatgcactttgtgaaggaggccagcggtattggtggtgagattatccaccagcctaccacccagactgggaccgtttacatccttctgcagggttccactatcttccatgaccgcagaagagaccaggtgttgccttttcaggccgctgctccgctcaactaccattacgcgtaccgcctcgacaccggcgactccactctcacaaacgaaccctctgaacagtttgccaacaagttcatgcagatgacacccttcacccgttggaggcttcgtctgtctgcgtccgcaaaagagaatgcaggattagcctttcccacggctacagcacttgactccactacccagattgtcatcactttccatgttacggccatcagacaaattgactggcggcacgacgaagag

SEQ ID NO: 227 - DNA, 2601 bp, synthetic construct
  misc_feature 1..2601: note = Synthetic
  source 1..2601: mol_type = other DNA
atggctctcgtggattacggcaagcttttcgaggatctgaaccagataagcatgggtgtactggatcgggtagagttttcagaggtgatggtgatccacaggatgtatgtgaggctagctgatctgaatgtggggcagctcgagggagccgagaaagtgaggcggttgtatatttttgccgacattctcgagctaccagtcgtggaatggcggtggccgccgcaaataccaggatcggtgacggtgatcatattgtgtcgtcttcttcaatggccaactgatgggaggcagtcggacaccgagctccacctgacattcatgaagttgcatgccatacaacgagaggaaaatcggtgggagataaccgcagcagatggcatgaactggggagtttacatacacgcagaggaagtacaggttggcgtgctgacaatgtcatggtcttcggtacttagagtttcggcacttcgctctgttataacctccggctttcgcgccgttagtgtgtttgaggtaccgggaagtgtaaggtccacccttggagctactttaaggcccgatcacgccttatatagtacaactatgcaagccacacccaacgcatcgcatattagtgcttttaaccttcgcatagtttccccgtcggcatatcgtgtttgtcctctccaaaatgacacagatacctacttaggtattccagcagacgtggcggcagttcttccagtagacgtggtgactgatcctaacatcttgctgggcatgcagacaacggtacacattgcggagctagtcaaggcatgtcatccgtcacccgatgttgtgagcgctgtaggggagcacctgaactggctcaacaaactcttactcccacttaaggaatcgactcagttgcaaggaagcgagtcgtacaaggagtgccttgcactcttgggtcgtgttcacgctgcgatgaagatggtgagaattggcttagtagtgccccagctgcaatacagaatgtacggtagcctcatcaaccaaatggcccaagtagcacaaaactacgaccgagaattcaagcaattcaaattattcatcatccaaaatcaaatccttggcagctatttgctgcagcagaacagggcatttgctgagagggagctgcagatggagagctttcatgctgctgtcatttctcaaagaagggaggagttggacaatacattcgcaaagatggaccgattgagcgggcaaatggaggcagagagtagtgcaatggagcaagccaaaaaggaaatggacgaaggattgaggcagttccagaataggcaagttgcgaacgccctctttgccgttcttagcgctgtagctcagattgggcttgcattccttacggctggtgcaacggctcctggagctgtggcgtcggcggggcaagctgtgagcatagcaggtcaggcggcgcaaggtctgcgaagggtggtggaaattctagagcagctggaggctgtgatggaggttgtggctgctgtgaaggacctcgtggattcattggaacaggtaggtcagattgtggacgcaccggtgatgccggaattgccctcagaggcggactggtccatttttgtgaacgaggtggaggccgtggcagagggcatgccaacggaagtctcggaggttccggtgtggagggccaagtgcaagaatgtggctgcactgggtcgggagatgagcatcacggcagtacagatgtcggagctgcagtatgacatctgggtgcaaggcatgatgcgggatatggctcgaagccaggcagacaggctggccgcaattcaacccgcggaccttaccaactatttggagatggctacccagatggatatgcggactacgaggatgctgctggggctcctcaacatattgcgcatccagaatgcggcgctcaggtacgagtatcttctaatgcccacggagctcacaacatggccactgggtatggataccgtgggtgacttgctcatcgcgcaggagaatgctgcactgataggattaatgcagctagggccctcatctgatttcacgagcaggcatgtggtgaaagacatacctgtgaacttgctgctcgatggcgaggattgggagtttgagattcctgtgcaagctggcatgtccagcttcccttccagctggtctcgcgtccgtattcggcacctggagatgcactttgtgaaggaggccagcggtattggtggtgagattatccaccagcctaccacccagactgggaccgtttacatccttctgcagggttccactatcttccatgaccgcagaagagaccaggtgttgccttttcaggccgctgctccgctcaactaccattacgcgtaccgcctcgacaccggcgactccactctcacaaacgaaccctctgaacagtttgccaacaagttcatgcagatgacacccttcacccgttggaggcttcgtctgtctgcgtccgcaaaagagaatgcaggattagcctttcccacggctacagcacttgactccactacccagattgtcatcactttccatgttacggccatcagacaaattgactggcggcacgacgaagag

SEQ ID NO: 228 - DNA, 2601 bp, synthetic construct
  misc_feature 1..2601: note = Synthetic
  source 1..2601: mol_type = other DNA
atggctctcgtggattacggcaagcttttcgaggatctgaaccagataagcatgggtgtactggatcgggtagagttttcagaggtgatggtgatccacaggatgtatgtgaggctagctgatctgaatgtggggcagctcgagggagccgagaaagtgaggcggttgtatatttttgccgacattgtcgagctaccagtcgtggaatggcggtggccggcgcaaataccaggatcggtgacggtgatcatattgtgtcgtcttcttcaatggccaactgatgggaggcagtcggacaccgagctccacctgacattcatgaagttgcatgccatacaacgagaggaaaatcggtgggagataaccgcagcagatggcatgaactggggagtttacatacacgcagaggaagtacaggttggcgtgctgacaatgtcatggtcttcggtacttagagtttcggcacttcgctctgttataacctccggctttcgcgccgttagtgtgtttgaggtaccgggaagtgtaaggtccacccttggagctactttaaggcccgatcacgccttatatagtacaactatgcaagccacacccaacgcatcgcatattagtgcttttaaccttcgcatagtttccccgtcggcatatcgtgtttgtcctctccaaaatgacacagatacctacttaggtattccagcagacgtggcggcagttcttccagtagacgtggtgactgatcctaacatcttgctgggcatgcagacaacggtacacattgcggagctagtcaaggcatgtcatccgtcacccgatgttgtgagcgctgtaggggagcacctgaactggctcaacaaactcttactcccacttaaggaatcgactcagttgcaaggaagcgagtcgtacaaggagtgccttgcactcttgggtcgtgttcacgctgcgatgaagatggtgagaattggcttagtagtgccccagctgcaatacagaatgtacggtagcctcatcaaccaaatggcccaagtagcacaaaactacgaccgagaattcaagcaattcaaattattcatcatccaaaatcaaatccttggcagctatttgctgcagcagaacagggcatttgctgagagggagctgcagatggagagctttcatgctgctgtcatttctcaaagaagggaggagttggacaatacattcgcaaagatggaccgattgagcgggcaaatggaggcagagagtagtgcaatggagcaagccaaaaaggaaatggacgaaggattgaggcagttccagaataggcaagttgcgaacgccctctttgccgttcttagcgctgtagctcagattgggcttgcattccttacggctggtgcaacggctcctggagctgtggcgtcggcggggcaagctgtgagcatagcaggtcaggcggcgcaaggtctgcgaagggtggtggaaattctagagcagctggaggctgtgatggaggttgtggctgctgtgaaggacctcgtggattcattggaacaggtaggtcagattgtggacgcaccggtgatgccggaattgccctcagaggcggactggtccatttttgtgaacgaggtggaggccgtggcagagggcatgccaacggaagtctcggaggttccggtgtggagggccaagtgcaagaatgtggctgcactgggtcgggagatgagcatcacggcagtacagatgtcggagctgcagtatgacatctgggtgcaaggcatgatgcgggatatggctcgaagccaggcagacaggctggccgcaattcaacccgcggaccttaccaactatttggagatggctacccagatggatatgcggactacgaggatgctgctggggctcctcaacatattgcgcatccagaatgcggcgctcaggtacgagtatcttctaatgcccacggagctcacaacatggccactgggtatggataccgtgggtgacttgctcatcgcgcaggagaatgctgcactgataggattaatgcagctagggccctcatctgatttcacgagcaggcatgtggtgaaagacatacctgtgaacttgctgctcgatggcgaggattgggagtttgagattcctgtgcaagctggcatgtccagcttcccttccagctggtctcgcgtccgtattcggcacctggagatgcactttgtgaaggaggccagcggtattggtggtgagattatccaccagcctaccacccagactgggaccgtttacatccttctgcagggttccactatcttccatgaccgcagaagagaccaggtgttgccttttcaggccgctgctccgctcaactaccattacgcgtaccgcctcgacaccggcgactccactctcacaaacgaaccctctgaacagtttgccaacaagttcatgcagatgacacccttcacccgttggaggcttcgtctgtctgcgtccgcaaaagagaatgcaggattagcctttcccacggctacagcacttgactccactacccagattgtcatcactttccatgttacggccatcagacaaattgactggcggcacgacgaagag

SEQ ID NO: 229 - DNA, 2601 bp, synthetic construct
  misc_feature 1..2601: note = Synthetic
  source 1..2601: mol_type = other DNA
atggctctcgtggattacggcaagcttttcgaggatctgaaccagataagcatgggtgtactggatcgggtagagttttcagaggtgatggtgatccacaggatgtatgtgaggctagctgatctgaatgtggggcagctcgagggagccgagaaagtgaggcgcttgtatatttttggcgacattgtcgagctaccagtcgtggaatggcggtggccgccgcaaataccaggatcggtgacggtgatcatattgtgtcgtcttcttcaatggccaactgatgggaggcagtcggacaccgagctccacctgacattcatgaagttgcatgccatacaacgagaggaaaatcggtgggagataaccgcagcagatggcatgaactggggagtttacatacacgcagaggaagtacaggttggcgtgctgacaatgtcatggtcttcggtacttagagtttcggcacttcgctctgttataacctccggctttcgcgccgttagtgtgtttgaggtaccgggaagtgtaaggtccacccttggagctactttaaggcccgatcacgccttatatagtacaactatgcaagccacacccaacgcatcgcatattagtgcttttaaccttcgcatagtttccccgtcggcatatcgtgtttgtcctctccaaaatgacacagatacctacttaggtattccagcagacgtggcggcagttcttccagtagacgtggtgactgatcctaacatcttgctgggcatgcagacaacggtacacattgcggagctagtcaaggcatgtcatccgtcacccgatgttgtgagcgctgtaggggagcacctgaactggctcaacaaactcttactcccacttaaggaatcgactcagttgcaaggaagcgagtcgtacaaggagtgccttgcactcttgggtcgtgttcacgctgcgatgaagatggtgagaattggcttagtagtgccccagctgcaatacagaatgtacggtagcctcatcaaccaaatggcccaagtagcacaaaactacgaccgagaattcaagcaattcaaattattcatcatccaaaatcaaatccttggcagctatttgctgcagcagaacagggcatttgctgagagggagctgcagatggagagctttcatgctgctgtcatttctcaaagaagggaggagttggacaatacattcgcaaagatggaccgattgagcgggcaaatggaggcagagagtagtgcaatggagcaagccaaaaaggaaatggacgaaggattgaggcagttccagaataggcaagttgcgaacgccctctttgccgttcttagcgctgtagctcagattgggcttgcattccttacggctggtgcaacggctcctggagctgtggcgtcggcggggcaagctgtgagcatagcaggtcaggcggcgcaaggtctgcgaagggtggtggaaattctagagcagctggaggctgtgatggaggttgtggctgctgtgaaggacctcgtggattcattggaacaggtaggtcagattgtggacgcaccggtgatgccggaattgccctcagaggcggactggtccatttttgtgaacgaggtggaggccgtggcagagggcatgccaacggaagtctcggaggttccggtgtggagggccaagtgcaagaatgtggctgcactgggtcgggagatgagcatcacggcagtacagatgtcggagctgcagtatgacatctgggtgcaaggcatgatgcgggatatggctcgaagccaggcagacaggctggccgcaattcaacccgcggaccttaccaactatttggagatggctacccagatggatatgcggactacgaggatgctgctggggctcctcaacatattgcgcatccagaatgcggcgctcaggtacgagtatcttctaatgcccacggagctcacaacatggccactgggtatggataccgtgggtgacttgctcatcgcgcaggagaatgctgcactgataggattaatgcagctagggccctcatctgatttcacgagcaggcatgtggtgaaagacatacctgtgaacttgctgctcgatggcgaggattgggagtttgagattcctgtgcaagctggcatgtccagcttcccttccagctggtctcgcgtccgtattcggcacctggagatgcactttgtgaaggaggccagcggtattggtggtgagattatccaccagcctaccacccagactgggaccgtttacatccttctgcagggttccactatcttccatgaccgcagaagagaccaggtgttgccttttcaggccgctgctccgctcaactaccattacgcgtaccgcctcgacaccggcgactccactctcacaaacgaaccctctgaacagtttgccaacaagttcatgcagatgacacccttcacccgttggaggcttcgtctgtctgcgtccgcaaaagagaatgcaggattagcctttcccacggctacagcacttgactccactacccagattgtcatcactttccatgttacggccatcagacaaattgactggcggcacgacgaagag

SEQ ID NO: 230 - DNA, 2601 bp, synthetic construct
  misc_feature 1..2601: note = Synthetic
  source 1..2601: mol_type = other DNA
atggctctcgtggattacggcaagcttttcgaggatctgaaccagataagcatgggtgtactggatcgggtagagttttcagaggtgatggtgatccacaggatgtatgtgaggctagctgatctgaatgtggggcagctcgagggagccgagaaagtgaggcgcttgtatatttttaccgacattatcgagctaccagtcgtggaatggcggtggccgccgcaaataccaggatcggtgacggtgatcatattgtgtcgtcttcttcaatggccaactgatgggaggcagtcggacaccgagctccacctgacattcatgaagttgcatgccatacaacgagaggaaaatcggtgggagataaccgcagcagatggcatgaactggggagtttacatacacgcagaggaagtacaggttggcgtgctgacaatgtcatggtcttcggtacttagagtttcggcacttcgctctgttataacctccggctttcgcgccgttagtgtgtttgaggtaccgggaagtgtaaggtccacccttggagctactttaaggcccgatcacgccttatatagtacaactatgcaagccacacccaacgcatcgcatattagtgcttttaaccttcgcatagtttccccgtcggcatatcgtgtttgtcctctccaaaatgacacagatacctacttaggtattccagcagacgtggcggcagttcttccagtagacgtggtgactgatcctaacatcttgctgggcatgcagacaacggtacacattgcggagctagtcaaggcatgtcatccgtcacccgatgttgtgagcgctgtaggggagcacctgaactggctcaacaaactcttactcccacttaaggaatcgactcagttgcaaggaagcgagtcgtacaaggagtgccttgcactcttgggtcgtgttcacgctgcgatgaagatggtgagaattggcttagtagtgccccagctgcaatacagaatgtacggtagcctcatcaaccaaatggcccaagtagcacaaaactacgaccgagaattcaagcaattcaaattattcatcatccaaaatcaaatccttggcagctatttgctgcagcagaacagggcatttgctgagagggagctgcagatggagagctttcatgctgctgtcatttctcaaagaagggaggagttggacaatacattcgcaaagatggaccgattgagcgggcaaatggaggcagagagtagtgcaatggagcaagccaaaaaggaaatggacgaaggattgaggcagttccagaataggcaagttgcgaacgccctctttgccgttcttagcgctgtagctcagattgggcttgcattccttacggctggtgcaacggctcctggagctgtggcgtcggcggggcaagctgtgagcatagcaggtcaggcggcgcaaggtctgcgaagggtggtggaaattctagagcagctggaggctgtgatggaggttgtggctgctgtgaaggacctcgtggattcattggaacaggtaggtcagattgtggacgcaccggtgatgccggaattgccctcagaggcggactggtccatttttgtgaacgaggtggaggccgtggcagagggcatgccaacggaagtctcggaggttccggtgtggagggccaagtgcaagaatgtggctgcactgggtcgggagatgagcatcacggcagtacagatgtcggagctgcagtatgacatctgggtgcaaggcatgatgcgggatatggctcgaagccaggcagacaggctggccgcaattcaacccgcggaccttaccaactatttggagatggctacccagatggatatgcggactacgaggatgctgctggggctcctcaacatattgcgcatccagaatgcggcgctcaggtacgagtatcttctaatgcccacggagctcacaacatggccactgggtatggataccgtgggtgacttgctcatcgcgcaggagaatgctgcactgataggattaatgcagctagggccctcatctgatttcacgagcaggcatgtggtgaaagacatacctgtgaacttgctgctcgatggcgaggattgggagtttgagattcctgtgcaagctggcatgtccagcttcccttccagctggtctcgcgtccgtattcggcacctggagatgcactttgtgaaggaggccagcggtattggtggtgagattatccaccagcctaccacccagactgggaccgtttacatccttctgcagggttccactatcttccatgaccgcagaagagaccaggtgttgccttttcaggccgctgctccgctcaactaccattacgcgtaccgcctcgacaccggcgactccactctcacaaacgaaccctctgaacagtttgccaacaagttcatgcagatgacacccttcacccgttggaggcttcgtctgtctgcgtccgcaaaagagaatgcaggattagcctttcccacggctacagcacttgactccactacccagattgtcatcactttccatgttacggccatcagacaaattgactggcggcacgacgaagag

SEQ ID NO: 231 - DNA, 2601 bp, synthetic construct
  misc_feature 1..2601: note = Synthetic
  source 1..2601: mol_type = other DNA
atggctctcgtggattacggcaagcttttcgaggatctgaaccagataagcatgggtgtactggatcgggtagagttttcagaggtgatggtgatccacaggatgtatgtgaggctagctgatctgaatgtggggcagctcgagggagccgagaaagtgaggcgcttgtatgtttttgccgacattatcgacctaccagtcgtggaatggcggtggccgccgcaaataccaggatcggtgacggtgatcatattgtgtcgtcttcttcaatggccaactgatgggaggcagtcggacaccgagctccacctgacattcatgaagttgcatgccatacaacgagaggaaaatcggtgggagataaccgcagcagatggcatgaactggggagtttacatacacgcagaggaagtacaggttggcgtgctgacaatgtcatggtcttcggtacttagagtttcggcacttcgctctgttataacctccggctttcgcgccgttagtgtgtttgaggtaccgggaagtgtaaggtccacccttggagctactttaaggcccgatcacgccttatatagtacaactatgcaagccacacccaacgcatcgcatattagtgcttttaaccttcgcatagtttccccgtcggcatatcgtgtttgtcctctccaaaatgacacagatacctacttaggtattccagcagacgtggcggcagttcttccagtagacgtggtgactgatcctaacatcttgctgggcatgcagacaacggtacacattgcggagctagtcaaggcatgtcatccgtcacccgatgttgtgagcgctgtaggggagcacctgaactggctcaacaaactcttactcccacttaaggaatcgactcagttgcaaggaagcgagtcgtacaaggagtgccttgcactcttgggtcgtgttcacgctgcgatgaagatggtgagaattggcttagtagtgccccagctgcaatacagaatgtacggtagcctcatcaaccaaatggcccaagtagcacaaaactacgaccgagaattcaagcaattcaaattattcatcatccaaaatcaaatccttggcagctatttgctgcagcagaacagggcatttgctgagagggagctgcagatggagagctttcatgctgctgtcatttctcaaagaagggaggagttggacaatacattcgcaaagatggaccgattgagcgggcaaatggaggcagagagtagtgcaatggagcaagccaaaaaggaaatggacgaaggattgaggcagttccagaataggcaagttgcgaacgccctctttgccgttcttagcgctgtagctcagattgggcttgcattccttacggctggtgcaacggctcctggagctgtggcgtcggcggggcaagctgtgagcatagcaggtcaggcggcgcaaggtctgcgaagggtggtggaaattctagagcagctggaggctgtgatggaggttgtggctgctgtgaaggacctcgtggattcattggaacaggtaggtcagattgtggacgcaccggtgatgccggaattgccctcagaggcggactggtccatttttgtgaacgaggtggaggccgtggcagagggcatgccaacggaagtctcggaggttccggtgtggagggccaagtgcaagaatgtggctgcactgggtcgggagatgagcatcacggcagtacagatgtcggagctgcagtatgacatctgggtgcaaggcatgatgcgggatatggctcgaagccaggcagacaggctggccgcaattcaacccgcggaccttaccaactatttggagatggctacccagatggatatgcggactacgaggatgctgctggggctcctcaacatattgcgcatccagaatgcggcgctcaggtacgagtatcttctaatgcccacggagctcacaacatggccactgggtatggataccgtgggtgacttgctcatcgcgcaggagaatgctgcactgataggattaatgcagctagggccctcatctgatttcacgagcaggcatgtggtgaaagacatacctgtgaacttgctgctcgatggcgaggattgggagtttgagattcctgtgcaagctggcatgtccagcttcccttccagctggtctcgcgtccgtattcggcacctggagatgcactttgtgaaggaggccagcggtattggtggtgagattatccaccagcctaccacccagactgggaccgtttacatccttctgcagggttccactatcttccatgaccgcagaagagaccaggtgttgccttttcaggccgctgctccgctcaactaccattacgcgtaccgcctcgacaccggcgactccactctcacaaacgaaccctctgaacagtttgccaacaagttcatgcagatgacacccttcacccgttggaggcttcgtctgtctgcgtccgcaaaagagaatgcaggattagcctttcccacggctacagcacttgactccactacccagattgtcatcactttccatgttacggccatcagacaaattgactggcggcacgacgaagag

SEQ ID NO: 232 - DNA, 2601 bp, synthetic construct
  misc_feature 1..2601: note = Synthetic
  source 1..2601: mol_type = other DNA
atggctctcgtggattacggcaagcttttcgaggatctgaaccagataagcatgggtgtactggatcgggtagagttttcagaggtgatggtgatccacaggatgtatgtgaggctagctgatctgaatgtggggcagctcgagggagccgagaaagtgaggcggttgtatgtttttgccgacattgtcgtgctaccagtcgtggaatggcggtggccgccgcaaataccaggatcggtgacggtgatcatattgtgtcgtcttcttcaatggccaactgatgggaggcagtcggacaccgagctccacctgacattcatgaagttgcatgccatacaacgagaggaaaatcggtgggagataaccgcagcagatggcatgaactggggagtttacatacacgcagaggaagtacaggttggcgtgctgacaatgtcatggtcttcggtacttagagtttcggcacttcgctctgttataacctccggctttcgcgccgttagtgtgtttgaggtaccgggaagtgtaaggtccacccttggagctactttaaggcccgatcacgccttatatagtacaactatgcaagccacacccaacgcatcgcatattagtgcttttaaccttcgcatagtttccccgtcggcatatcgtgtttgtcctctccaaaatgacacagatacctacttaggtattccagcagacgtggcggcagttcttccagtagacgtggtgactgatcctaacatcttgctgggcatgcagacaacggtacacattgcggagctagtcaaggcatgtcatccgtcacccgatgttgtgagcgctgtaggggagcacctgaactggctcaacaaactcttactcccacttaaggaatcgactcagttgcaaggaagcgagtcgtacaaggagtgccttgcactcttgggtcgtgttcacgctgcgatgaagatggtgagaattggcttagtagtgccccagctgcaatacagaatgtacggtagcctcatcaaccaaatggcccaagtagcacaaaactacgaccgagaattcaagcaattcaaattattcatcatccaaaatcaaatccttggcagctatttgctgcagcagaacagggcatttgctgagagggagctgcagatggagagctttcatgctgctgtcatttctcaaagaagggaggagttggacaatacattcgcaaagatggaccgattgagcgggcaaatggaggcagagagtagtgcaatggagcaagccaaaaaggaaatggacgaaggattgaggcagttccagaataggcaagttgcgaacgccctctttgccgttcttagcgctgtagctcagattgggcttgcattccttacggctggtgcaacggctcctggagctgtggcgtcggcggggcaagctgtgagcatagcaggtcaggcggcgcaaggtctgcgaagggtggtggaaattctagagcagctggaggctgtgatggaggttgtggctgctgtgaaggacctcgtggattcattggaacaggtaggtcagattgtggacgcaccggtgatgccggaattgccctcagaggcggactggtccatttttgtgaacgaggtggaggccgtggcagagggcatgccaacggaagtctcggaggttccggtgtggagggccaagtgcaagaatgtggctgcactgggtcgggagatgagcatcacggcagtacagatgtcggagctgcagtatgacatctgggtgcaaggcatgatgcgggatatggctcgaagccaggcagacaggctggccgcaattcaacccgcggaccttaccaactatttggagatggctacccagatggatatgcggactacgaggatgctgctggggctcctcaacatattgcgcatccagaatgcggcgctcaggtacgagtatcttctaatgcccacggagctcacaacatggccactgggtatggataccgtgggtgacttgctcatcgcgcaggagaatgctgcactgataggattaatgcagctagggccctcatctgatttcacgagcaggcatgtggtgaaagacatacctgtgaacttgctgctcgatggcgaggattgggagtttgagattcctgtgcaagctggcatgtccagcttcccttccagctggtctcgcgtccgtattcggcacctggagatgcactttgtgaaggaggccagcggtattggtggtgagattatccaccagcctaccacccagactgggaccgtttacatccttctgcagggttccactatcttccatgaccgcagaagagaccaggtgttgccttttcaggccgctgctccgctcaactaccattacgcgtaccgcctcgacaccggcgactccactctcacaaacgaaccctctgaacagtttgccaacaagttcatgcagatgacacccttcacccgttggaggcttcgtctgtctgcgtccgcaaaagagaatgcaggattagcctttcccacggctacagcacttgactccactacccagattgtcatcactttccatgttacggccatcagacaaattgactggcggcacgacgaagag

SEQ ID NO: 233 - DNA, 2601 bp, synthetic construct
  misc_feature 1..2601: note = Synthetic
  source 1..2601: mol_type = other DNA
atggctctcgtggattacggcaagcttttcgaggatctgaaccagataagcatgggtgtactggatcgggtagagttttcagaggtgatggtgatccacaggatgtatgtgaggctagctgatctgaatgtggggcagctcgagggagccgagaaagtgaggcgcttgtatgttttttgcgacgttgtcgtgctaccagtcgtggaatggcggtggccgccgcaaataccaggatcggtgacggtgatcatattgtgtcgtcttcttcaatggccaactgatgggaggcagtcggacaccgagctccacctgacattcatgaagttgcatgccatacaacgagaggaaaatcggtgggagataaccgcagcagatggcatgaactggggagtttacatacacgcagaggaagtacaggttggcgtgctgacaatgtcatggtcttcggtacttagagtttcggcacttcgctctgttataacctccggctttcgcgccgttagtgtgtttgaggtaccgggaagtgtaaggtccacccttggagctactttaaggcccgatcacgccttatatagtacaactatgcaagccacacccaacgcatcgcatattagtgcttttaaccttcgcatagtttccccgtcggcatatcgtgtttgtcctctccaaaatgacacagatacctacttaggtattccagcagacgtggcggcagttcttccagtagacgtggtgactgatcctaacatcttgctgggcatgcagacaacggtacacattgcggagctagtcaaggcatgtcatccgtcacccgatgttgtgagcgctgtaggggagcacctgaactggctcaacaaactcttactcccacttaaggaatcgactcagttgcaaggaagcgagtcgtacaaggagtgccttgcactcttgggtcgtgttcacgctgcgatgaagatggtgagaattggcttagtagtgccccagctgcaatacagaatgtacggtagcctcatcaaccaaatggcccaagtagcacaaaactacgaccgagaattcaagcaattcaaattattcatcatccaaaatcaaatccttggcagctatttgctgcagcagaacagggcatttgctgagagggagctgcagatggagagctttcatgctgctgtcatttctcaaagaagggaggagttggacaatacattcgcaaagatggaccgattgagcgggcaaatggaggcagagagtagtgcaatggagcaagccaaaaaggaaatggacgaaggattgaggcagttccagaataggcaagttgcgaacgccctctttgccgttcttagcgctgtagctcagattgggcttgcattccttacggctggtgcaacggctcctggagctgtggcgtcggcggggcaagctgtgagcatagcaggtcaggcggcgcaaggtctgcgaagggtggtggaaattctagagcagctggaggctgtgatggaggttgtggctgctgtgaaggacctcgtggattcattggaacaggtaggtcagattgtggacgcaccggtgatgccggaattgccctcagaggcggactggtccatttttgtgaacgaggtggaggccgtggcagagggcatgccaacggaagtctcggaggttccggtgtggagggccaagtgcaagaatgtggctgcactgggtcgggagatgagcatcacggcagtacagatgtcggagctgcagtatgacatctgggtgcaaggcatgatgcgggatatggctcgaagccaggcagacaggctggccgcaattcaacccgcggaccttaccaactatttggagatggctacccagatggatatgcggactacgaggatgctgctggggctcctcaacatattgcgcatccagaatgcggcgctcaggtacgagtatcttctaatgcccacggagctcacaacatggccactgggtatggataccgtgggtgacttgctcatcgcgcaggagaatgctgcactgataggattaatgcagctagggccctcatctgatttcacgagcaggcatgtggtgaaagacatacctgtgaacttgctgctcgatggcgaggattgggagtttgagattcctgtgcaagctggcatgtccagcttcccttccagctggtctcgcgtccgtattcggcacctggagatgcactttgtgaaggaggccagcggtattggtggtgagattatccaccagcctaccacccagactgggaccgtttacatccttctgcagggttccactatcttccatgaccgcagaagagaccaggtgttgccttttcaggccgctgctccgctcaactaccattacgcgtaccgcctcgacaccggcgactccactctcacaaacgaaccctctgaacagtttgccaacaagttcatgcagatgacacccttcacccgttggaggcttcgtctgtctgcgtccgcaaaagagaatgcaggattagcctttcccacggctacagcacttgactccactacccagattgtcatcactttccatgttacggccatcagacaaattgactggcggcacgacgaagag

SEQ ID NO: 234 - DNA, 2601 bp, synthetic construct
  misc_feature 1..2601: note = Synthetic
  source 1..2601: mol_type = other DNA
atggctctcgtggattacggcaagcttttcgaggatctgaaccagataagcatgggtgtactggatcgggtagagttttcagaggtgatggtgatccacaggatgtatgtgaggctagctgatctgaatgtggggcagctcgagggagccgagaaagtgaggcggttgtatgtttttaccgacattatcgagctaccagtcgtggaatggcggtggccgccgcaaataccaggatcggtgacggtgatcatattgtgtcgtcttcttcaatggccaactgatgggaggcagtcggacaccgagctccacctgacattcatgaagttgcatgccatacaacgagaggaaaatcggtgggagataaccgcagcagatggcatgaactggggagtttacatacacgcagaggaagtacaggttggcgtgctgacaatgtcatggtcttcggtacttagagtttcggcacttcgctctgttataacctccggctttcgcgccgttagtgtgtttgaggtaccgggaagtgtaaggtccacccttggagctactttaaggcccgatcacgccttatatagtacaactatgcaagccacacccaacgcatcgcatattagtgcttttaaccttcgcatagtttccccgtcggcatatcgtgtttgtcctctccaaaatgacacagatacctacttaggtattccagcagacgtggcggcagttcttccagtagacgtggtgactgatcctaacatcttgctgggcatgcagacaacggtacacattgcggagctagtcaaggcatgtcatccgtcacccgatgttgtgagcgctgtaggggagcacctgaactggctcaacaaactcttactcccacttaaggaatcgactcagttgcaaggaagcgagtcgtacaaggagtgccttgcactcttgggtcgtgttcacgctgcgatgaagatggtgagaattggcttagtagtgccccagctgcaatacagaatgtacggtagcctcatcaaccaaatggcccaagtagcacaaaactacgaccgagaattcaagcaattcaaattattcatcatccaaaatcaaatccttggcagctatttgctgcagcagaacagggcatttgctgagagggagctgcagatggagagctttcatgctgctgtcatttctcaaagaagggaggagttggacaatacattcgcaaagatggaccgattgagcgggcaaatggaggcagagagtagtgcaatggagcaagccaaaaaggaaatggacgaaggattgaggcagttccagaataggcaagttgcgaacgccctctttgccgttcttagcgctgtagctcagattgggcttgcattccttacggctggtgcaacggctcctggagctgtggcgtcggcggggcaagctgtgagcatagcaggtcaggcggcgcaaggtctgcgaagggtggtggaaattctagagcagctggaggctgtgatggaggttgtggctgctgtgaaggacctcgtggattcattggaacaggtaggtcagattgtggacgcaccggtgatgccggaattgccctcagaggcggactggtccatttttgtgaacgaggtggaggccgtggcagagggcatgccaacggaagtctcggaggttccggtgtggagggccaagtgcaagaatgtggctgcactgggtcgggagatgagcatcacggcagtacagatgtcggagctgcagtatgacatctgggtgcaaggcatgatgcgggatatggctcgaagccaggcagacaggctggccgcaattcaacccgcggaccttaccaactatttggagatggctacccagatggatatgcggactacgaggatgctgctggggctcctcaacatattgcgcatccagaatgcggcgctcaggtacgagtatcttctaatgcccacggagctcacaacatggccactgggtatggataccgtgggtgacttgctcatcgcgcaggagaatgctgcactgataggattaatgcagctagggccctcatctgatttcacgagcaggcatgtggtgaaagacatacctgtgaacttgctgctcgatggcgaggattgggagtttgagattcctgtgcaagctggcatgtccagcttcccttccagctggtctcgcgtccgtattcggcacctggagatgcactttgtgaaggaggccagcggtattggtggtgagattatccaccagcctaccacccagactgggaccgtttacatccttctgcagggttccactatcttccatgaccgcagaagagaccaggtgttgccttttcaggccgctgctccgctcaactaccattacgcgtaccgcctcgacaccggcgactccactctcacaaacgaaccctctgaacagtttgccaacaagttcatgcagatgacacccttcacccgttggaggcttcgtctgtctgcgtccgcaaaagagaatgcaggattagcctttcccacggctacagcacttgactccactacccagattgtcatcactttccatgttacggccatcagacaaattgactggcggcacgacgaagag

SEQ ID NO: 235 - DNA, 2601 bp, synthetic construct
  misc_feature 1..2601: note = Synthetic
  source 1..2601: mol_type = other DNA
atggctctcgtggattacggcaagcttttcgaggatctgaaccagataagcatgggtgtactggatcgggtagagttttcagaggtgatggtgatccacaggatgtatgtgaggctagctgatctgaatgtggggcagctcgagggagccgagaaagtgaggcggttgtatgtttttaccgacgttctcgtgctaccagtcgtggaatggcggtggccgccgcaaataccaggatcggtgacggtgatcatattgtgtcgtcttcttcaatggccaactgatgggaggcagtcggacaccgagctccacctgacattcatgaagttgcatgccatacaacgagaggaaaatcggtgggagataaccgcagcagatggcatgaactggggagtttacatacacgcagaggaagtacaggttggcgtgctgacaatgtcatggtcttcggtacttagagtttcggcacttcgctctgttataacctccggctttcgcgccgttagtgtgtttgaggtaccgggaagtgtaaggtccacccttggagctactttaaggcccgatcacgccttatatagtacaactatgcaagccacacccaacgcatcgcatattagtgcttttaaccttcgcatagtttccccgtcggcatatcgtgtttgtcctctccaaaatgacacagatacctacttaggtattccagcagacgtggcggcagttcttccagtagacgtggtgactgatcctaacatcttgctgggcatgcagacaacggtacacattgcggagctagtcaaggcatgtcatccgtcacccgatgttgtgagcgctgtaggggagcacctgaactggctcaacaaactcttactcccacttaaggaatcgactcagttgcaaggaagcgagtcgtacaaggagtgccttgcactcttgggtcgtgttcacgctgcgatgaagatggtgagaattggcttagtagtgccccagctgcaatacagaatgtacggtagcctcatcaaccaaatggcccaagtagcacaaaactacgaccgagaattcaagcaattcaaattattcatcatccaaaatcaaatccttggcagctatttgctgcagcagaacagggcatttgctgagagggagctgcagatggagagctttcatgctgctgtcatttctcaaagaagggaggagttggacaatacattcgcaaagatggaccgattgagcgggcaaatggaggcagagagtagtgcaatggagcaagccaaaaaggaaatggacgaaggattgaggcagttccagaataggcaagttgcgaacgccctctttgccgttcttagcgctgtagctcagattgggcttgcattccttacggctggtgcaacggctcctggagctgtggcgtcggcggggcaagctgtgagcatagcaggtcaggcggcgcaaggtctgcgaagggtggtggaaattctagagcagctggaggctgtgatggaggttgtggctgctgtgaaggacctcgtggattcattggaacaggtaggtcagattgtggacgcaccggtgatgccggaattgccctcagaggcggactggtccatttttgtgaacgaggtggaggccgtggcagagggcatgccaacggaagtctcggaggttccggtgtggagggccaagtgcaagaatgtggctgcactgggtcgggagatgagcatcacggcagtacagatgtcggagctgcagtatgacatctgggtgcaaggcatgatgcgggatatggctcgaagccaggcagacaggctggccgcaattcaacccgcggaccttaccaactatttggagatggctacccagatggatatgcggactacgaggatgctgctggggctcctcaacatattgcgcatccagaatgcggcgctcaggtacgagtatcttctaatgcccacggagctcacaacatggccactgggtatggataccgtgggtgacttgctcatcgcgcaggagaatgctgcactgataggattaatgcagctagggccctcatctgatttcacgagcaggcatgtggtgaaagacatacctgtgaacttgctgctcgatggcgaggattgggagtttgagattcctgtgcaagctggcatgtccagcttcccttccagctggtctcgcgtccgtattcggcacctggagatgcactttgtgaaggaggccagcggtattggtggtgagattatccaccagcctaccacccagactgggaccgtttacatccttctgcagggttccactatcttccatgaccgcagaagagaccaggtgttgccttttcaggccgctgctccgctcaactaccattacgcgtaccgcctcgacaccggcgactccactctcacaaacgaaccctctgaacagtttgccaacaagttcatgcagatgacacccttcacccgttggaggcttcgtctgtctgcgtccgcaaaagagaatgcaggattagcctttcccacggctacagcacttgactccactacccagattgtcatcactttccatgttacggccatcagacaaattgactggcggcacgacgaagag

SEQ ID NO: 236 - protein, 867 aa, synthetic construct
  REGION 1..867: note = Synthetic
MALVDYGKLFEDLNQISMGVLDRVEFSEVMVIHRMYVRLADLNVGQLEGAEKVKHLYIFCDVIELPVVEWRWPPQIPGSVTVIILCRLLQWPTDGRQSDTELHLTFMKLHAIQREENRWEITAADGMNWGVYIHAEEVQVGVLTMSWSSVLRVSALRSVITSGFRAVSVFEVPGSVRSTLGATLRPDHALYSTTMQATPNASHISAFNLRIVSPSAYRVCPLQNDTDTYLGIPADVAAVLPVDVVTDPNILLGMQTTVHIAELVKACHPSPDVVSAVGEHLNWLNKLLLPLKESTQLQGSESYKECLALLGRVHAAMKMVRIGLVVPQLQYRMYGSLINQMAQVAQNYDREFKQFKLFIIQNQILGSYLLQQNRAFAERELQMESFHAAVISQRREELDNTFAKMDRLSGQMEAESSAMEQAKKEMDEGLRQFQNRQVANALFAVLSAVAQIGLAFLTAGATAPGAVASAGQAVSIAGQAAQGLRRVVEILEQLEAVMEVVAAVKDLVDSLEQVGQIVDAPVMPELPSEADWSIFVNEVEAVAEGMPTEVSEVPVWRAKCKNVAALGREMSITAVQMSELQYDIWVQGMMRDMARSQADRLAAIQPADLTNYLEMATQMDMRTTRMLLGLLNILRIQNAALRYEYLLMPTELTTWPLGMDTVGDLLIAQENAALIGLMQLGPSSDFTSRHVVKDIPVNLLLDGEDWEFEIPVQAGMSSFPSSWSRVRIRHLEMHFVKEASGIGGEIIHQPTTQTGTVYILLQGSTIFHDRRRDQVLPFQAAAPLNYHYAYRLDTGDSTLTNEPSEQFANKFMQMTPFTRWRLRLSASAKENAGLAFPTATALDSTTQIVITFHVTAIRQIDWRHDEE

SEQ ID NO: 237 - protein, 867 aa, synthetic construct
  REGION 1..867: note = Synthetic
MALVDYGKLFEDLNQISMGVLDRVEFSEVMVIHRMYVRLADLNVGQLEGAEKVKHLYIFCDVVELPVVEWRWPPQIPGSVTVIILCRLLQWPTDGRQSDTELHLTFMKLHAIQREENRWEITAADGMNWGVYIHAEEVQVGVLTMSWSSVLRVSALRSVITSGFRAVSVFEVPGSVRSTLGATLRPDHALYSTTMQATPNASHISAFNLRIVSPSAYRVCPLQNDTDTYLGIPADVAAVLPVDVVTDPNILLGMQTTVHIAELVKACHPSPDVVSAVGEHLNWLNKLLLPLKESTQLQGSESYKECLALLGRVHAAMKMVRIGLVVPQLQYRMYGSLINQMAQVAQNYDREFKQFKLFIIQNQILGSYLLQQNRAFAERELQMESFHAAVISQRREELDNTFAKMDRLSGQMEAESSAMEQAKKEMDEGLRQFQNRQVANALFAVLSAVAQIGLAFLTAGATAPGAVASAGQAVSIAGQAAQGLRRVVEILEQLEAVMEVVAAVKDLVDSLEQVGQIVDAPVMPELPSEADWSIFVNEVEAVAEGMPTEVSEVPVWRAKCKNVAALGREMSITAVQMSELQYDIWVQGMMRDMARSQADRLAAIQPADLTNYLEMATQMDMRTTRMLLGLLNILRIQNAALRYEYLLMPTELTTWPLGMDTVGDLLIAQENAALIGLMQLGPSSDFTSRHVVKDIPVNLLLDGEDWEFEIPVQAGMSSFPSSWSRVRIRHLEMHFVKEASGIGGEIIHQPTTQTGTVYILLQGSTIFHDRRRDQVLPFQAAAPLNYHYAYRLDTGDSTLTNEPSEQFANKFMQMTPFTRWRLRLSASAKENAGLAFPTATALDSTTQIVITFHVTAIRQIDWRHDEE

SEQ ID NO: 238 - protein, 867 aa, synthetic construct
  REGION 1..867: note = Synthetic
MALVDYGKLFEDLNQISMGVLDRVEFSEVMVIHRMYVRLADLNVGQLEGAEKVKHLYIFSDIIELPVVEWRWPPQIPGSVTVIILCRLLQWPTDGRQSDTELHLTFMKLHAIQREENRWEITAADGMNWGVYIHAEEVQVGVLTMSWSSVLRVSALRSVITSGFRAVSVFEVPGSVRSTLGATLRPDHALYSTTMQATPNASHISAFNLRIVSPSAYRVCPLQNDTDTYLGIPADVAAVLPVDVVTDPNILLGMQTTVHIAELVKACHPSPDVVSAVGEHLNWLNKLLLPLKESTQLQGSESYKECLALLGRVHAAMKMVRIGLVVPQLQYRMYGSLINQMAQVAQNYDREFKQFKLFIIQNQILGSYLLQQNRAFAERELQMESFHAAVISQRREELDNTFAKMDRLSGQMEAESSAMEQAKKEMDEGLRQFQNRQVANALFAVLSAVAQIGLAFLTAGATAPGAVASAGQAVSIAGQAAQGLRRVVEILEQLEAVMEVVAAVKDLVDSLEQVGQIVDAPVMPELPSEADWSIFVNEVEAVAEGMPTEVSEVPVWRAKCKNVAALGREMSITAVQMSELQYDIWVQGMMRDMARSQADRLAAIQPADLTNYLEMATQMDMRTTRMLLGLLNILRIQNAALRYEYLLMPTELTTWPLGMDTVGDLLIAQENAALIGLMQLGPSSDFTSRHVVKDIPVNLLLDGEDWEFEIPVQAGMSSFPSSWSRVRIRHLEMHFVKEASGIGGEIIHQPTTQTGTVYILLQGSTIFHDRRRDQVLPFQAAAPLNYHYAYRLDTGDSTLTNEPSEQFANKFMQMTPFTRWRLRLSASAKENAGLAFPTATALDSTTQIVITFHVTAIRQIDWRHDEE

SEQ ID NO: 239 - protein, 867 aa, synthetic construct
  REGION 1..867: note = Synthetic
MALVDYGKLFEDLNQISMGVLDRVEFSEVMVIHRMYVRLADLNVGQLEGAEKVKHLYIFTDVLELPVVEWRWPPQIPGSVTVIILCRLLQWPTDGRQSDTELHLTFMKLHAIQREENRWEITAADGMNWGVYIHAEEVQVGVLTMSWSSVLRVSALRSVITSGFRAVSVFEVPGSVRSTLGATLRPDHALYSTTMQATPNASHISAFNLRIVSPSAYRVCPLQNDTDTYLGIPADVAAVLPVDVVTDPNILLGMQTTVHIAELVKACHPSPDVVSAVGEHLNWLNKLLLPLKESTQLQGSESYKECLALLGRVHAAMKMVRIGLVVPQLQYRMYGSLINQMAQVAQNYDREFKQFKLFIIQNQILGSYLLQQNRAFAERELQMESFHAAVISQRREELDNTFAKMDRLSGQMEAESSAMEQAKKEMDEGLRQFQNRQVANALFAVLSAVAQIGLAFLTAGATAPGAVASAGQAVSIAGQAAQGLRRVVEILEQLEAVMEVVAAVKDLVDSLEQVGQIVDAPVMPELPSEADWSIFVNEVEAVAEGMPTEVSEVPVWRAKCKNVAALGREMSITAVQMSELQYDIWVQGMMRDMARSQADRLAAIQPADLTNYLEMATQMDMRTTRMLLGLLNILRIQNAALRYEYLLMPTELTTWPLGMDTVGDLLIAQENAALIGLMQLGPSSDFTSRHVVKDIPVNLLLDGEDWEFEIPVQAGMSSFPSSWSRVRIRHLEMHFVKEASGIGGEIIHQPTTQTGTVYILLQGSTIFHDRRRDQVLPFQAAAPLNYHYAYRLDTGDSTLTNEPSEQFANKFMQMTPFTRWRLRLSASAKENAGLAFPTATALDSTTQIVITFHVTAIRQIDWRHDEE

SEQ ID NO: 240 - protein, 867 aa, synthetic construct
  REGION 1..867: note = Synthetic
MALVDYGKLFEDLNQISMGVLDRVEFSEVMVIHRMYVRLADLNVGQLEGAEKVKHLYVFADIIVLPVVEWRWPPQIPGSVTVIILCRLLQWPTDGRQSDTELHLTFMKLHAIQREENRWEITAADGMNWGVYIHAEEVQVGVLTMSWSSVLRVSALRSVITSGFRAVSVFEVPGSVRSTLGATLRPDHALYSTTMQATPNASHISAFNLRIVSPSAYRVCPLQNDTDTYLGIPADVAAVLPVDVVTDPNILLGMQTTVHIAELVKACHPSPDVVSAVGEHLNWLNKLLLPLKESTQLQGSESYKECLALLGRVHAAMKMVRIGLVVPQLQYRMYGSLINQMAQVAQNYDREFKQFKLFIIQNQILGSYLLQQNRAFAERELQMESFHAAVISQRREELDNTFAKMDRLSGQMEAESSAMEQAKKEMDEGLRQFQNRQVANALFAVLSAVAQIGLAFLTAGATAPGAVASAGQAVSIAGQAAQGLRRVVEILEQLEAVMEVVAAVKDLVDSLEQVGQIVDAPVMPELPSEADWSIFVNEVEAVAEGMPTEVSEVPVWRAKCKNVAALGREMSITAVQMSELQYDIWVQGMMRDMARSQADRLAAIQPADLTNYLEMATQMDMRTTRMLLGLLNILRIQNAALRYEYLLMPTELTTWPLGMDTVGDLLIAQENAALIGLMQLGPSSDFTSRHVVKDIPVNLLLDGEDWEFEIPVQAGMSSFPSSWSRVRIRHLEMHFVKEASGIGGEIIHQPTTQTGTVYILLQGSTIFHDRRRDQVLPFQAAAPLNYHYAYRLDTGDSTLTNEPSEQFANKFMQMTPFTRWRLRLSASAKENAGLAFPTATALDSTTQIVITFHVTAIRQIDWRHDEE

SEQ ID NO: 241 - protein, 867 aa, synthetic construct
  REGION 1..867: note = Synthetic
MALVDYGKLFEDLNQISMGVLDRVEFSEVMVIHRMYVRLADLNVGQLEGAEKVKHLYVFADVIELPVVEWRWPPQIPGSVTVIILCRLLQWPTDGRQSDTELHLTFMKLHAIQREENRWEITAADGMNWGVYIHAEEVQVGVLTMSWSSVLRVSALRSVITSGFRAVSVFEVPGSVRSTLGATLRPDHALYSTTMQATPNASHISAFNLRIVSPSAYRVCPLQNDTDTYLGIPADVAAVLPVDVVTDPNILLGMQTTVHIAELVKACHPSPDVVSAVGEHLNWLNKLLLPLKESTQLQGSESYKECLALLGRVHAAMKMVRIGLVVPQLQYRMYGSLINQMAQVAQNYDREFKQFKLFIIQNQILGSYLLQQNRAFAERELQMESFHAAVISQRREELDNTFAKMDRLSGQMEAESSAMEQAKKEMDEGLRQFQNRQVANALFAVLSAVAQIGLAFLTAGATAPGAVASAGQAVSIAGQAAQGLRRVVEILEQLEAVMEVVAAVKDLVDSLEQVGQIVDAPVMPELPSEADWSIFVNEVEAVAEGMPTEVSEVPVWRAKCKNVAALGREMSITAVQMSELQYDIWVQGMMRDMARSQADRLAAIQPADLTNYLEMATQMDMRTTRMLLGLLNILRIQNAALRYEYLLMPTELTTWPLGMDTVGDLLIAQENAALIGLMQLGPSSDFTSRHVVKDIPVNLLLDGEDWEFEIPVQAGMSSFPSSWSRVRIRHLEMHFVKEASGIGGEIIHQPTTQTGTVYILLQGSTIFHDRRRDQVLPFQAAAPLNYHYAYRLDTGDSTLTNEPSEQFANKFMQMTPFTRWRLRLSASAKENAGLAFPTATALDSTTQIVITFHVTAIRQIDWRHDEE

SEQ ID NO: 242 - protein, 867 aa, synthetic construct
  REGION 1..867: note = Synthetic
MALVDYGKLFEDLNQISMGVLDRVEFSEVMVIHRMYVRLADLNVGQLEGAEKVKHLYVFGDVIELPVVEWRWPPQIPGSVTVIILCRLLQWPTDGRQSDTELHLTFMKLHAIQREENRWEITAADGMNWGVYIHAEEVQVGVLTMSWSSVLRVSALRSVITSGFRAVSVFEVPGSVRSTLGATLRPDHALYSTTMQATPNASHISAFNLRIVSPSAYRVCPLQNDTDTYLGIPADVAAVLPVDVVTDPNILLGMQTTVHIAELVKACHPSPDVVSAVGEHLNWLNKLLLPLKESTQLQGSESYKECLALLGRVHAAMKMVRIGLVVPQLQYRMYGSLINQMAQVAQNYDREFKQFKLFIIQNQILGSYLLQQNRAFAERELQMESFHAAVISQRREELDNTFAKMDRLSGQMEAESSAMEQAKKEMDEGLRQFQNRQVANALFAVLSAVAQIGLAFLTAGATAPGAVASAGQAVSIAGQAAQGLRRVVEILEQLEAVMEVVAAVKDLVDSLEQVGQIVDAPVMPELPSEADWSIFVNEVEAVAEGMPTEVSEVPVWRAKCKNVAALGREMSITAVQMSELQYDIWVQGMMRDMARSQADRLAAIQPADLTNYLEMATQMDMRTTRMLLGLLNILRIQNAALRYEYLLMPTELTTWPLGMDTVGDLLIAQENAALIGLMQLGPSSDFTSRHVVKDIPVNLLLDGEDWEFEIPVQAGMSSFPSSWSRVRIRHLEMHFVKEASGIGGEIIHQPTTQTGTVYILLQGSTIFHDRRRDQVLPFQAAAPLNYHYAYRLDTGDSTLTNEPSEQFANKFMQMTPFTRWRLRLSASAKENAGLAFPTATALDSTTQIVITFHVTAIRQIDWRHDEE

SEQ ID NO: 243 - protein, 867 aa, synthetic construct
  REGION 1..867: note = Synthetic
MALVDYGKLFEDLNQISMGVLDRVEFSEVMVIHRMYVRLADLNVGQLEGAEKVKHLYVFSDVIELPVVEWRWPPQIPGSVTVIILCRLLQWPTDGRQSDTELHLTFMKLHAIQREENRWEITAADGMNWGVYIHAEEVQVGVLTMSWSSVLRVSALRSVITSGFRAVSVFEVPGSVRSTLGATLRPDHALYSTTMQATPNASHISAFNLRIVSPSAYRVCPLQNDTDTYLGIPADVAAVLPVDVVTDPNILLGMQTTVHIAELVKACHPSPDVVSAVGEHLNWLNKLLLPLKESTQLQGSESYKECLALLGRVHAAMKMVRIGLVVPQLQYRMYGSLINQMAQVAQNYDREFKQFKLFIIQNQILGSYLLQQNRAFAERELQMESFHAAVISQRREELDNTFAKMDRLSGQMEAESSAMEQAKKEMDEGLRQFQNRQVANALFAVLSAVAQIGLAFLTAGATAPGAVASAGQAVSIAGQAAQGLRRVVEILEQLEAVMEVVAAVKDLVDSLEQVGQIVDAPVMPELPSEADWSIFVNEVEAVAEGMPTEVSEVPVWRAKCKNVAALGREMSITAVQMSELQYDIWVQGMMRDMARSQADRLAAIQPADLTNYLEMATQMDMRTTRMLLGLLNILRIQNAALRYEYLLMPTELTTWPLGMDTVGDLLIAQENAALIGLMQLGPSSDFTSRHVVKDIPVNLLLDGEDWEFEIPVQAGMSSFPSSWSRVRIRHLEMHFVKEASGIGGEIIHQPTTQTGTVYILLQGSTIFHDRRRDQVLPFQAAAPLNYHYAYRLDTGDSTLTNEPSEQFANKFMQMTPFTRWRLRLSASAKENAGLAFPTATALDSTTQIVITFHVTAIRQIDWRHDEE

SEQ ID NO: 244 - protein, 867 aa, synthetic construct
  REGION 1..867: note = Synthetic
MALVDYGKLFEDLNQISMGVLDRVEFSEVMVIHRMYVRLADLNVGQLEGAEKVKHLYVFSDVLVLPVVEWRWPPQIPGSVTVIILCRLLQWPTDGRQSDTELHLTFMKLHAIQREENRWEITAADGMNWGVYIHAEEVQVGVLTMSWSSVLRVSALRSVITSGFRAVSVFEVPGSVRSTLGATLRPDHALYSTTMQATPNASHISAFNLRIVSPSAYRVCPLQNDTDTYLGIPADVAAVLPVDVVTDPNILLGMQTTVHIAELVKACHPSPDVVSAVGEHLNWLNKLLLPLKESTQLQGSESYKECLALLGRVHAAMKMVRIGLVVPQLQYRMYGSLINQMAQVAQNYDREFKQFKLFIIQNQILGSYLLQQNRAFAERELQMESFHAAVISQRREELDNTFAKMDRLSGQMEAESSAMEQAKKEMDEGLRQFQNRQVANALFAVLSAVAQIGLAFLTAGATAPGAVASAGQAVSIAGQAAQGLRRVVEILEQLEAVMEVVAAVKDLVDSLEQVGQIVDAPVMPELPSEADWSIFVNEVEAVAEGMPTEVSEVPVWRAKCKNVAALGREMSITAVQMSELQYDIWVQGMMRDMARSQADRLAAIQPADLTNYLEMATQMDMRTTRMLLGLLNILRIQNAALRYEYLLMPTELTTWPLGMDTVGDLLIAQENAALIGLMQLGPSSDFTSRHVVKDIPVNLLLDGEDWEFEIPVQAGMSSFPSSWSRVRIRHLEMHFVKEASGIGGEIIHQPTTQTGTVYILLQGSTIFHDRRRDQVLPFQAAAPLNYHYAYRLDTGDSTLTNEPSEQFANKFMQMTPFTRWRLRLSASAKENAGLAFPTATALDSTTQIVITFHVTAIRQIDWRHDEE

SEQ ID NO: 245 - protein, 867 aa, synthetic construct
  REGION 1..867: note = Synthetic
MALVDYGKLFEDLNQISMGVLDRVEFSEVMVIHRMYVRLADLNVGQLEGAEKVKQLIIFSDIIELPVVEWRWPPQIPGSVTVIILCRLLQWPTDGRQSDTELHLTFMKLHAIQREENRWEITAADGMNWGVYIHAEEVQVGVLTMSWSSVLRVSALRSVITSGFRAVSVFEVPGSVRSTLGATLRPDHALYSTTMQATPNASHISAFNLRIVSPSAYRVCPLQNDTDTYLGIPADVAAVLPVDVVTDPNILLGMQTTVHIAELVKACHPSPDVVSAVGEHLNWLNKLLLPLKESTQLQGSESYKECLALLGRVHAAMKMVRIGLVVPQLQYRMYGSLINQMAQVAQNYDREFKQFKLFIIQNQILGSYLLQQNRAFAERELQMESFHAAVISQRREELDNTFAKMDRLSGQMEAESSAMEQAKKEMDEGLRQFQNRQVANALFAVLSAVAQIGLAFLTAGATAPGAVASAGQAVSIAGQAAQGLRRVVEILEQLEAVMEVVAAVKDLVDSLEQVGQIVDAPVMPELPSEADWSIFVNEVEAVAEGMPTEVSEVPVWRAKCKNVAALGREMSITAVQMSELQYDIWVQGMMRDMARSQADRLAAIQPADLTNYLEMATQMDMRTTRMLLGLLNILRIQNAALRYEYLLMPTELTTWPLGMDTVGDLLIAQENAALIGLMQLGPSSDFTSRHVVKDIPVNLLLDGEDWEFEIPVQAGMSSFPSSWSRVRIRHLEMHFVKEASGIGGEIIHQPTTQTGTVYILLQGSTIFHDRRRDQVLPFQAAAPLNYHYAYRLDTGDSTLTNEPSEQFANKFMQMTPFTRWRLRLSASAKENAGLAFPTATALDSTTQIVITFHVTAIRQIDWRHDEE

SEQ ID NO: 246 - protein, 867 aa, synthetic construct
  REGION 1..867: note = Synthetic
MALVDYGKLFEDLNQISMGVLDRVEFSEVMVIHRMYVRLADLNVGQLEGAEKVKQLYIFCDIIELPVVEWRWPPQIPGSVTVIILCRLLQWPTDGRQSDTELHLTFMKLHAIQREENRWEITAADGMNWGVYIHAEEVQVGVLTMSWSSVLRVSALRSVITSGFRAVSVFEVPGSVRSTLGATLRPDHALYSTTMQATPNASHISAFNLRIVSPSAYRVCPLQNDTDTYLGIPADVAAVLPVDVVTDPNILLGMQTTVHIAELVKACHPSPDVVSAVGEHLNWLNKLLLPLKESTQLQGSESYKECLALLGRVHAAMKMVRIGLVVPQLQYRMYGSLINQMAQVAQNYDREFKQFKLFIIQNQILGSYLLQQNRAFAERELQMESFHAAVISQRREELDNTFAKMDRLSGQMEAESSAMEQAKKEMDEGLRQFQNRQVANALFAVLSAVAQIGLAFLTAGATAPGAVASAGQAVSIAGQAAQGLRRVVEILEQLEAVMEVVAAVKDLVDSLEQVGQIVDAPVMPELPSEADWSIFVNEVEAVAEGMPTEVSEVPVWRAKCKNVAALGREMSITAVQMSELQYDIWVQGMMRDMARSQADRLAAIQPADLTNYLEMATQMDMRTTRMLLGLLNILRIQNAALRYEYLLMPTELTTWPLGMDTVGDLLIAQENAALIGLMQLGPSSDFTSRHVVKDIPVNLLLDGEDWEFEIPVQAGMSSFPSSWSRVRIRHLEMHFVKEASGIGGEIIHQPTTQTGTVYILLQGSTIFHDRRRDQVLPFQAAAPLNYHYAYRLDTGDSTLTNEPSEQFANKFMQMTPFTRWRLRLSASAKENAGLAFPTATALDSTTQIVITFHVTAIRQIDWRHDEE

SEQ ID NO: 247 - protein, 867 aa, synthetic construct
  REGION 1..867: note = Synthetic
MALVDYGKLFEDLNQISMGVLDRVEFSEVMVIHRMYVRLADLNVGQLEGAEKVKQLYIFCDVLELPVVEWRWPPQIPGSVTVIILCRLLQWPTDGRQSDTELHLTFMKLHAIQREENRWEITAADGMNWGVYIHAEEVQVGVLTMSWSSVLRVSALRSVITSGFRAVSVFEVPGSVRSTLGATLRPDHALYSTTMQATPNASHISAFNLRIVSPSAYRVCPLQNDTDTYLGIPADVAAVLPVDVVTDPNILLGMQTTVHIAELVKACHPSPDVVSAVGEHLNWLNKLLLPLKESTQLQGSESYKECLALLGRVHAAMKMVRIGLVVPQLQYRMYGSLINQMAQVAQNYDREFKQFKLFIIQNQILGSYLLQQNRAFAERELQMESFHAAVISQRREELDNTFAKMDRLSGQMEAESSAMEQAKKEMDEGLRQFQNRQVANALFAVLSAVAQIGLAFLTAGATAPGAVASAGQAVSIAGQAAQGLRRVVEILEQLEAVMEVVAAVKDLVDSLEQVGQIVDAPVMPELPSEADWSIFVNEVEAVAEGMPTEVSEVPVWRAKCKNVAALGREMSITAVQMSELQYDIWVQGMMRDMARSQADRLAAIQPADLTNYLEMATQMDMRTTRMLLGLLNILRIQNAALRYEYLLMPTELTTWPLGMDTVGDLLIAQENAALIGLMQLGPSSDFTSRHVVKDIPVNLLLDGEDWEFEIPVQAGMSSFPSSWSRVRIRHLEMHFVKEASGIGGEIIHQPTTQTGTVYILLQGSTIFHDRRRDQVLPFQAAAPLNYHYAYRLDTGDSTLTNEPSEQFANKFMQMTPFTRWRLRLSASAKENAGLAFPTATALDSTTQIVITFHVTAIRQIDWRHDEE

SEQ ID NO: 248 - protein, 867 aa, synthetic construct
  REGION 1..867: note = Synthetic
MALVDYGKLFEDLNQISMGVLDRVEFSEVMVIHRMYVRLADLNVGQLEGAEKVKQLYIFGDVIELPVVEWRWPPQIPGSVTVIILCRLLQWPTDGRQSDTELHLTFMKLHAIQREENRWEITAADGMNWGVYIHAEEVQVGVLTMSWSSVLRVSALRSVITSGFRAVSVFEVPGSVRSTLGATLRPDHALYSTTMQATPNASHISAFNLRIVSPSAYRVCPLQNDTDTYLGIPADVAAVLPVDVVTDPNILLGMQTTVHIAELVKACHPSPDVVSAVGEHLNWLNKLLLPLKESTQLQGSESYKECLALLGRVHAAMKMVRIGLVVPQLQYRMYGSLINQMAQVAQNYDREFKQFKLFIIQNQILGSYLLQQNRAFAERELQMESFHAAVISQRREELDNTFAKMDRLSGQMEAESSAMEQAKKEMDEGLRQFQNRQVANALFAVLSAVAQIGLAFLTAGATAPGAVASAGQAVSIAGQAAQGLRRVVEILEQLEAVMEVVAAVKDLVDSLEQVGQIVDAPVMPELPSEADWSIFVNEVEAVAEGMPTEVSEVPVWRAKCKNVAALGREMSITAVQMSELQYDIWVQGMMRDMARSQADRLAAIQPADLTNYLEMATQMDMRTTRMLLGLLNILRIQNAALRYEYLLMPTELTTWPLGMDTVGDLLIAQENAALIGLMQLGPSSDFTSRHVVKDIPVNLLLDGEDWEFEIPVQAGMSSFPSSWSRVRIRHLEMHFVKEASGIGGEIIHQPTTQTGTVYILLQGSTIFHDRRRDQVLPFQAAAPLNYHYAYRLDTGDSTLTNEPSEQFANKFMQMTPFTRWRLRLSASAKENAGLAFPTATALDSTTQIVITFHVTAIRQIDWRHDEE

SEQ ID NO: 249 - protein, 867 aa, synthetic construct
  REGION 1..867: note = Synthetic
MALVDYGKLFEDLNQISMGVLDRIEFSEVMVIHRMYVRLADLNVGQLEGAEKVKQLYIFSDIIELPVVEWRWPPQIPGSVTVIILCRLLQWPTDGRQSDTELHLTFMKLHAIQREENRWEITAADGMNWGVYIHAEEVQVGVLTMSWSSVLRVSALRSVITSGFRAVSVFEVPGSVRSTLGATLRPDHALYSTTMQATPNASHISAFNLRIVSPSAYRVCPLQNDTDTYLGIPADVAAVLPVDVVTDPNILLGMQTTVHIAELVKACHPSPDVVSAVGEHLNWLNKLLLPLKESTQLQGSESYKECLALLGRVHAAMKMVRIGLVVPQLQYRMYGSLINQMAQVAQNYDREFKQFKLFIIQNQILGSYLLQQNRAFAERELQMESFHAAVISQRREELDNTFAKMDRLSGQMEAESSAMEQAKKEMDEGLRQFQNRQVANALFAVLSAVAQIGLAFLTAGATAPGAVASAGQAVSIAGQAAQGLRRVVEILEQLEAVMEVVAAVKDLVDSLEQVGQIVDAPVMPELPSEADWSIFVNEVEAVAEGMPTEVSEVPVWRAKCKNVAALGREMSITAVQMSELQYDIWVQGMMRDMARSQADRLAAIQPADLTNYLEMATQMDMRTTRMLLGLLNILRIQNAALRYEYLLMPTELTTWPLGMDTVGDLLIAQENAALIGLMQLGPSSDFTSRHVVKDIPVNLLLDGEDWEFEIPVQAGMSSFPSSWSRVRIRHLEMHFVKEASGIGGEIIHQPTTQTGTVYILLQGSTIFHDRRRDQVLPFQAAAPLNYHYAYRLDTGDSTLTNEPSEQFANKFMQMTPFTRWRLRLSASAKENAGLAFPTATALDSTTQIVITFHVTAIRQIDWRHDEE

SEQ ID NO: 250 - protein, 867 aa, synthetic construct
  REGION 1..867: note = Synthetic
MALVDYGKLFEDLNQISMGVLDRVEFSEVMVIHRMYVRLADLNVGQLEGAEKVKQLYVFCDILELPVVEWRWPPQIPGSVTVIILCRLLQWPTDGRQSDTELHLTFMKLHAIQREENRWEITAADGMNWGVYIHAEEVQVGVLTMSWSSVLRVSALRSVITSGFRAVSVFEVPGSVRSTLGATLRPDHALYSTTMQATPNASHISAFNLRIVSPSAYRVCPLQNDTDTYLGIPADVAAVLPVDVVTDPNILLGMQTTVHIAELVKACHPSPDVVSAVGEHLNWLNKLLLPLKESTQLQGSESYKECLALLGRVHAAMKMVRIGLVVPQLQYRMYGSLINQMAQVAQNYDREFKQFKLFIIQNQILGSYLLQQNRAFAERELQMESFHAAVISQRREELDNTFAKMDRLSGQMEAESSAMEQAKKEMDEGLRQFQNRQVANALFAVLSAVAQIGLAFLTAGATAPGAVASAGQAVSIAGQAAQGLRRVVEILEQLEAVMEVVAAVKDLVDSLEQVGQIVDAPVMPELPSEADWSIFVNEVEAVAEGMPTEVSEVPVWRAKCKNVAALGREMSITAVQMSELQYDIWVQGMMRDMARSQADRLAAIQPADLTNYLEMATQMDMRTTRMLLGLLNILRIQNAALRYEYLLMPTELTTWPLGMDTVGDLLIAQENAALIGLMQLGPSSDFTSRHVVKDIPVNLLLDGEDWEFEIPVQAGMSSFPSSWSRVRIRHLEMHFVKEASGIGGEIIHQPTTQTGTVYILLQGSTIFHDRRRDQVLPFQAAAPLNYHYAYRLDTGDSTLTNEPSEQFANKFMQMTPFTRWRLRLSASAKENAGLAFPTATALDSTTQIVITFHVTAIRQIDWRHDEE

SEQ ID NO: 251 - protein, 867 aa, synthetic construct
  REGION 1..867: note = Synthetic
MALVDYGKLFEDLNQISMGVLDRVEFSEVMVIHRMYVRLADLNVGQLEGAEKVKQLYVFSDILELPVVEWRWPPQIPGSVTVIILCRLLQWPTDGRQSDTELHLTFMKLHAIQREENRWEITAADGMNWGVYIHAEEVQVGVLTMSWSSVLRVSALRSVITSGFRAVSVFEVPGSVRSTLGATLRPDHALYSTTMQATPNASHISAFNLRIVSPSAYRVCPLQNDTDTYLGIPADVAAVLPVDVVTDPNILLGMQTTVHIAELVKACHPSPDVVSAVGEHLNWLNKLLLPLKESTQLQGSESYKECLALLGRVHAAMKMVRIGLVVPQLQYRMYGSLINQMAQVAQNYDREFKQFKLFIIQNQILGSYLLQQNRAFAERELQMESFHAAVISQRREELDNTFAKMDRLSGQMEAESSAMEQAKKEMDEGLRQFQNRQVANALFAVLSAVAQIGLAFLTAGATAPGAVASAGQAVSIAGQAAQGLRRVVEILEQLEAVMEVVAAVKDLVDSLEQVGQIVDAPVMPELPSEADWSIFVNEVEAVAEGMPTEVSEVPVWRAKCKNVAALGREMSITAVQMSELQYDIWVQGMMRDMARSQADRLAAIQPADLTNYLEMATQMDMRTTRMLLGLLNILRIQNAALRYEYLLMPTELTTWPLGMDTVGDLLIAQENAALIGLMQLGPSSDFTSRHVVKDIPVNLLLDGEDWEFEIPVQAGMSSFPSSWSRVRIRHLEMHFVKEASGIGGEIIHQPTTQTGTVYILLQGSTIFHDRRRDQVLPFQAAAPLNYHYAYRLDTGDSTLTNEPSEQFANKFMQMTPFTRWRLRLSASAKENAGLAFPTATALDSTTQIVITFHVTAIRQIDWRHDEE

SEQ ID NO: 252 - protein, 867 aa, synthetic construct
  REGION 1..867: note = Synthetic
MALVDYGKLFEDLNQISMGVLDRVEFSEVMVIHRMYVRLADLNVGQLEGAEKVKQLYVFSDVLVLPVVEWRWPPQIPGSVTVIILCRLLQWPTDGRQSDTELHLTFMKLHAIQREENRWEITAADGMNWGVYIHAEEVQVGVLTMSWSSVLRVSALRSVITSGFRAVSVFEVPGSVRSTLGATLRPDHALYSTTMQATPNASHISAFNLRIVSPSAYRVCPLQNDTDTYLGIPADVAAVLPVDVVTDPNILLGMQTTVHIAELVKACHPSPDVVSAVGEHLNWLNKLLLPLKESTQLQGSESYKECLALLGRVHAAMKMVRIGLVVPQLQYRMYGSLINQMAQVAQNYDREFKQFKLFIIQNQILGSYLLQQNRAFAERELQMESFHAAVISQRREELDNTFAKMDRLSGQMEAESSAMEQAKKEMDEGLRQFQNRQVANALFAVLSAVAQIGLAFLTAGATAPGAVASAGQAVSIAGQAAQGLRRVVEILEQLEAVMEVVAAVKDLVDSLEQVGQIVDAPVMPELPSEADWSIFVNEVEAVAEGMPTEVSEVPVWRAKCKNVAALGREMSITAVQMSELQYDIWVQGMMRDMARSQADRLAAIQPADLTNYLEMATQMDMRTTRMLLGLLNILRIQNAALRYEYLLMPTELTTWPLGMDTVGDLLIAQENAALIGLMQLGPSSDFTSRHVVKDIPVNLLLDGEDWEFEIPVQAGMSSFPSSWSRVRIRHLEMHFVKEASGIGGEIIHQPTTQTGTVYILLQGSTIFHDRRRDQVLPFQAAAPLNYHYAYRLDTGDSTLTNEPSEQFANKFMQMTPFTRWRLRLSASAKENAGLAFPTATALDSTTQIVITFHVTAIRQIDWRHDEE

SEQ ID NO: 253 - protein, 867 aa, synthetic construct
  REGION 1..867: note = Synthetic
MALVDYGKLFEDLNQISMGVLDRVEFSEVMVIHRMYVRLADLNVGQLEGAEKVKRFYIFADIVELPVVEWRWPPQIPGSVTVIILCRLLQWPTDGRQSDTELHLTFMKLHAIQREENRWEITAADGMNWGVYIHAEEVQVGVLTMSWSSVLRVSALRSVITSGFRAVSVFEVPGSVRSTLGATLRPDHALYSTTMQATPNASHISAFNLRIVSPSAYRVCPLQNDTDTYLGIPADVAAVLPVDVVTDPNILLGMQTTVHIAELVKACHPSPDVVSAVGEHLNWLNKLLLPLKESTQLQGSESYKECLALLGRVHAAMKMVRIGLVVPQLQYRMYGSLINQMAQVAQNYDREFKQFKLFIIQNQILGSYLLQQNRAFAERELQMESFHAAVISQRREELDNTFAKMDRLSGQMEAESSAMEQAKKEMDEGLRQFQNRQVANALFAVLSAVAQIGLAFLTAGATAPGAVASAGQAVSIAGQAAQGLRRVVEILEQLEAVMEVVAAVKDLVDSLEQVGQIVDAPVMPELPSEADWSIFVNEVEAVAEGMPTEVSEVPVWRAKCKNVAALGREMSITAVQMSELQYDIWVQGMMRDMARSQADRLAAIQPADLTNYLEMATQMDMRTTRMLLGLLNILRIQNAALRYEYLLMPTELTTWPLGMDTVGDLLIAQENAALIGLMQLGPSSDFTSRHVVKDIPVNLLLDGEDWEFEIPVQAGMSSFPSSWSRVRIRHLEMHFVKEASGIGGEIIHQPTTQTGTVYILLQGSTIFHDRRRDQVLPFQAAAPLNYHYAYRLDTGDSTLTNEPSEQFANKFMQMTPFTRWRLRLSASAKENAGLAFPTATALDSTTQIVITFHVTAIRQIDWRHDEE

SEQ ID NO: 254 - protein, 867 aa, synthetic construct
  REGION 1..867: note = Synthetic
MALVDYGKLFEDLNQISMGVLDRVEFSEVMVIHRMYVRLADLNVGQLEGAEKVKRFYIFSDIIELPVVEWRWPPQIPGSVTVIILCRLLQWPTDGRQSDTELHLTFMKLHAIQREENRWEITAADGMNWGVYIHAEEVQVGVLTMSWSSVLRVSALRSVITSGFRAVSVFEVPGSVRSTLGATLRPDHALYSTTMQATPNASHISAFNLRIVSPSAYRVCPLQNDTDTYLGIPADVAAVLPVDVVTDPNILLGMQTTVHIAELVKACHPSPDVVSAVGEHLNWLNKLLLPLKESTQLQGSESYKECLALLGRVHAAMKMVRIGLVVPQLQYRMYGSLINQMAQVAQNYDREFKQFKLFIIQNQILGSYLLQQNRAFAERELQMESFHAAVISQRREELDNTFAKMDRLSGQMEAESSAMEQAKKEMDEGLRQFQNRQVANALFAVLSAVAQIGLAFLTAGATAPGAVASAGQAVSIAGQAAQGLRRVVEILEQLEAVMEVVAAVKDLVDSLEQVGQIVDAPVMPELPSEADWSIFVNEVEAVAEGMPTEVSEVPVWRAKCKNVAALGREMSITAVQMSELQYDIWVQGMMRDMARSQADRLAAIQPADLTNYLEMATQMDMRTTRMLLGLLNILRIQNAALRYEYLLMPTELTTWPLGMDTVGDLLIAQENAALIGLMQLGPSSDFTSRHVVKDIPVNLLLDGEDWEFEIPVQAGMSSFPSSWSRVRIRHLEMHFVKEASGIGGEIIHQPTTQTGTVYILLQGSTIFHDRRRDQVLPFQAAAPLNYHYAYRLDTGDSTLTNEPSEQFANKFMQMTPFTRWRLRLSASAKENAGLAFPTATALDSTTQIVITFHVTAIRQIDWRHDEE

SEQ ID NO: 255 - protein, 867 aa, synthetic construct
  REGION 1..867: note = Synthetic
MALVDYGKLFEDLNQISMGVLDRVEFSEVMVIHRMYVRLADLNVGQLEGAEKVKRFYVFSDIVELPVVEWRWPPQIPGSVTVIILCRLLQWPTDGRQSDTELHLTFMKLHAIQREENRWEITAADGMNWGVYIHAEEVQVGVLTMSWSSVLRVSALRSVITSGFRAVSVFEVPGSVRSTLGATLRPDHALYSTTMQATPNASHISAFNLRIVSPSAYRVCPLQNDTDTYLGIPADVAAVLPVDVVTDPNILLGMQTTVHIAELVKACHPSPDVVSAVGEHLNWLNKLLLPLKESTQLQGSESYKECLALLGRVHAAMKMVRIGLVVPQLQYRMYGSLINQMAQVAQNYDREFKQFKLFIIQNQILGSYLLQQNRAFAERELQMESFHAAVISQRREELDNTFAKMDRLSGQMEAESSAMEQAKKEMDEGLRQFQNRQVANALFAVLSAVAQIGLAFLTAGATAPGAVASAGQAVSIAGQAAQGLRRVVEILEQLEAVMEVVAAVKDLVDSLEQVGQIVDAPVMPELPSEADWSIFVNEVEAVAEGMPTEVSEVPVWRAKCKNVAALGREMSITAVQMSELQYDIWVQGMMRDMARSQADRLAAIQPADLTNYLEMATQMDMRTTRMLLGLLNILRIQNAALRYEYLLMPTELTTWPLGMDTVGDLLIAQENAALIGLMQLGPSSDFTSRHVVKDIPVNLLLDGEDWEFEIPVQAGMSSFPSSWSRVRIRHLEMHFVKEASGIGGEIIHQPTTQTGTVYILLQGSTIFHDRRRDQVLPFQAAAPLNYHYAYRLDTGDSTLTNEPSEQFANKFMQMTPFTRWRLRLSASAKENAGLAFPTATALDSTTQIVITFHVTAIRQIDWRHDEE

SEQ ID NO: 256 - protein, 867 aa, synthetic construct
  REGION 1..867: note = Synthetic
MALVDYGKLFEDLNQISMGVLDRVEFSEVMVIHRMYVRLADLNVGQLEGAEKVKRLVILGDIIVVPVVEWRWPPQIPGSVTVIILCRLLQWPTDGRQSDTELHLTFMKLHAIQREENRWEITAADGMNWGVYIHAEEVQVGVLTMSWSSVLRVSALRSVITSGFRAVSVFEVPGSVRSTLGATLRPDHALYSTTMQATPNASHISAFNLRIVSPSAYRVCPLQNDTDTYLGIPADVAAVLPVDVVTDPNILLGMQTTVHIAELVKACHPSPDVVSAVGEHLNWLNKLLLPLKESTQLQGSESYKECLALLGRVHAAMKMVRIGLVVPQLQYRMYGSLINQMAQVAQNYDREFKQFKLFIIQNQILGSYLLQQNRAFAERELQMESFHAAVISQRREELDNTFAKMDRLSGQMEAESSAMEQAKKEMDEGLRQFQNRQVANALFAVLSAVAQIGLAFLTAGATAPGAVASAGQAVSIAGQAAQGLRRVVEILEQLEAVMEVVAAVKDLVDSLEQVGQIVDAPVMPELPSEADWSIFVNEVEAVAEGMPTEVSEVPVWRAKCKNVAALGREMSITAVQMSELQYDIWVQGMMRDMARSQADRLAAIQPADLTNYLEMATQMDMRTTRMLLGLLNILRIQNAALRYEYLLMPTELTTWPLGMDTVGDLLIAQENAALIGLMQLGPSSDFTSRHVVKDIPVNLLLDGEDWEFEIPVQAGMSSFPSSWSRVRIRHLEMHFVKEASGIGGEIIHQPTTQTGTVYILLQGSTIFHDRRRDQVLPFQAAAPLNYHYAYRLDTGDSTLTNEPSEQFANKFMQMTPFTRWRLRLSASAKENAGLAFPTATALDSTTQIVITFHVTAIRQIDWRHDEE

SEQ ID NO: 257 - protein, 867 aa, synthetic construct
  REGION 1..867: note = Synthetic
MALVDYGKLFEDLNQISMGVLDRVEFSEVMVIHRMYVRLADLNVGQLEGAEKVKRLYIFADIIELPVVEWRWPPQIPGSVTVIILCRLLQWPTDGRQSDTELHLTFMKLHAIQREENRWEITAADGMNWGVYIHAEEVQVGVLTMSWSSVLRVSALRSVITSGFRAVSVFEVPGSVRSTLGATLRPDHALYSTTMQATPNASHISAFNLRIVSPSAYRVCPLQNDTDTYLGIPADVAAVLPVDVVTDPNILLGMQTTVHIAELVKACHPSPDVVSAVGEHLNWLNKLLLPLKESTQLQGSESYKECLALLGRVHAAMKMVRIGLVVPQLQYRMYGSLINQMAQVAQNYDREFKQFKLFIIQNQILGSYLLQQNRAFAERELQMESFHAAVISQRREELDNTFAKMDRLSGQMEAESSAMEQAKKEMDEGLRQFQNRQVANALFAVLSAVAQIGLAFLTAGATAPGAVASAGQAVSIAGQAAQGLRRVVEILEQLEAVMEVVAAVKDLVDSLEQVGQIVDAPVMPELPSEADWSIFVNEVEAVAEGMPTEVSEVPVWRAKCKNVAALGREMSITAVQMSELQYDIWVQGMMRDMARSQADRLAAIQPADLTNYLEMATQMDMRTTRMLLGLLNILRIQNAALRYEYLLMPTELTTWPLGMDTVGDLLIAQENAALIGLMQLGPSSDFTSRHVVKDIPVNLLLDGEDWEFEIPVQAGMSSFPSSWSRVRIRHLEMHFVKEASGIGGEIIHQPTTQTGTVYILLQGSTIFHDRRRDQVLPFQAAAPLNYHYAYRLDTGDSTLTNEPSEQFANKFMQMTPFTRWRLRLSASAKENAGLAFPTATALDSTTQIVITFHVTAIRQIDWRHDEE

SEQ ID NO: 258 - protein, 867 aa, synthetic construct
  REGION 1..867: note = Synthetic
MALVDYGKLFEDLNQISMGVLDRVEFSEVMVIHRMYVRLADLNVGQLEGAEKVKRLYIFCDIIVLPVVEWRWPPQIPGSVTVIILCRLLQWPTDGRQSDTELHLTFMKLHAIQREENRWEITAADGMNWGVYIHAEEVQVGVLTMSWSSVLRVSALRSVITSGFRAVSVFEVPGSVRSTLGATLRPDHALYSTTMQATPNASHISAFNLRIVSPSAYRVCPLQNDTDTYLGIPADVAAVLPVDVVTDPNILLGMQTTVHIAELVKACHPSPDVVSAVGEHLNWLNKLLLPLKESTQLQGSESYKECLALLGRVHAAMKMVRIGLVVPQLQYRMYGSLINQMAQVAQNYDREFKQFKLFIIQNQILGSYLLQQNRAFAERELQMESFHAAVISQRREELDNTFAKMDRLSGQMEAESSAMEQAKKEMDEGLRQFQNRQVANALFAVLSAVAQIGLAFLTAGATAPGAVASAGQAVSIAGQAAQGLRRVVEILEQLEAVMEVVAAVKDLVDSLEQVGQIVDAPVMPELPSEADWSIFVNEVEAVAEGMPTEVSEVPVWRAKCKNVAALGREMSITAVQMSELQYDIWVQGMMRDMARSQADRLAAIQPADLTNYLEMATQMDMRTTRMLLGLLNILRIQNAALRYEYLLMPTELTTWPLGMDTVGDLLIAQENAALIGLMQLGPSSDFTSRHVVKDIPVNLLLDGEDWEFEIPVQAGMSSFPSSWSRVRIRHLEMHFVKEASGIGGEIIHQPTTQTGTVYILLQGSTIFHDRRRDQVLPFQAAAPLNYHYAYRLDTGDSTLTNEPSEQFANKFMQMTPFTRWRLRLSASAKENAGLAFPTATALDSTTQIVITFHVTAIRQIDWRHDEE

SEQ ID NO: 259 - protein, 867 aa, synthetic construct
  REGION 1..867: note = Synthetic
MALVDYGKLFEDLNQISMGVLDRVEFSEVMVIHRMYVRLADLNVGQLEGAEKVKRLYIFCDIVELPVVEWRWPPQIPGSVTVIILCRLLQWPTDGRQSDTELHLTFMKLHAIQREENRWEITAADGMNWGVYIHAEEVQVGVLTMSWSSVLRVSALRSVITSGFRAVSVFEVPGSVRSTLGATLRPDHALYSTTMQATPNASHISAFNLRIVSPSAYRVCPLQNDTDTYLGIPADVAAVLPVDVVTDPNILLGMQTTVHIAELVKACHPSPDVVSAVGEHLNWLNKLLLPLKESTQLQGSESYKECLALLGRVHAAMKMVRIGLVVPQLQYRMYGSLINQMAQVAQNYDREFKQFKLFIIQNQILGSYLLQQNRAFAERELQMESFHAAVISQRREELDNTFAKMDRLSGQMEAESSAMEQAKKEMDEGLRQFQNRQVANALFAVLSAVAQIGLAFLTAGATAPGAVASAGQAVSIAGQAAQGLRRVVEILEQLEAVMEVVAAVKDLVDSLEQVGQIVDAPVMPELPSEADWSIFVNEVEAVAEGMPTEVSEVPVWRAKCKNVAALGREMSITAVQMSELQYDIWVQGMMRDMARSQADRLAAIQPADLTNYLEMATQMDMRTTRMLLGLLNILRIQNAALRYEYLLMPTELTTWPLGMDTVGDLLIAQENAALIGLMQLGPSSDFTSRHVVKDIPVNLLLDGEDWEFEIPVQAGMSSFPSSWSRVRIRHLEMHFVKEASGIGGEIIHQPTTQTGTVYILLQGSTIFHDRRRDQVLPFQAAAPLNYHYAYRLDTGDSTLTNEPSEQFANKFMQMTPFTRWRLRLSASAKENAGLAFPTATALDSTTQIVITFHVTAIRQIDWRHDEE

SEQ ID NO: 260 - protein, 867 aa, synthetic construct
  REGION 1..867: note = Synthetic
MALVDYGKLFEDLNQISMGVLDRVEFSEVMVIHRMYVRLADLNVGQLEGAEKVKRLYIFGDIIELPVVEWRWPAQIPGSVTVIILCRLLQWPTDGRQSDTELHLTFMKLHAIQREENRWEITAADGMNWGVYIHAEEVQVGVLTMSWSSVLRVSALRSVITSGFRAVSVFEVPGSVRSTLGATLRPDHALYSTTMQATPNASHISAFNLRIVSPSAYRVCPLQNDTDTYLGIPADVAAVLPVDVVTDPNILLGMQTTVHIAELVKACHPSPDVVSAVGEHLNWLNKLLLPLKESTQLQGSESYKECLALLGRVHAAMKMVRIGLVVPQLQYRMYGSLINQMAQVAQNYDREFKQFKLFIIQNQILGSYLLQQNRAFAERELQMESFHAAVISQRREELDNTFAKMDRLSGQMEAESSAMEQAKKEMDEGLRQFQNRQVANALFAVLSAVAQIGLAFLTAGATAPGAVASAGQAVSIAGQAAQGLRRVVEILEQLEAVMEVVAAVKDLVDSLEQVGQIVDAPVMPELPSEADWSIFVNEVEAVAEGMPTEVSEVPVWRAKCKNVAALGREMSITAVQMSELQYDIWVQGMMRDMARSQADRLAAIQPADLTNYLEMATQMDMRTTRMLLGLLNILRIQNAALRYEYLLMPTELTTWPLGMDTVGDLLIAQENAALIGLMQLGPSSDFTSRHVVKDIPVNLLLDGEDWEFEIPVQAGMSSFPSSWSRVRIRHLEMHFVKEASGIGGEIIHQPTTQTGTVYILLQGSTIFHDRRRDQVLPFQAAAPLNYHYAYRLDTGDSTLTNEPSEQFANKFMQMTPFTRWRLRLSASAKENAGLAFPTATALDSTTQIVITFHVTAIRQIDWRHDEE

SEQ ID NO: 261 - protein, 867 aa, synthetic construct
  REGION 1..867: note = Synthetic
MALVDYGKLFEDLNQISMGVLDRVEFSEVMVIHRMYVRLADLNVGQLEGAEKVKRLYIFGDVIELPVVEWRWPPQIPGSVTVIILCRLLQWPTDGRQSDTELHLTFMKLHAIQREENRWEITAADGMNWGVYIHAEEVQVGVLTMSWSSVLRVSALRSVITSGFRAVSVFEVPGSVRSTLGATLRPDHALYSTTMQATPNASHISAFNLRIVSPSAYRVCPLQNDTDTYLGIPADVAAVLPVDVVTDPNILLGMQTTVHIAELVKACHPSPDVVSAVGEHLNWLNKLLLPLKESTQLQGSESYKECLALLGRVHAAMKMVRIGLVVPQLQYRMYGSLINQMAQVAQNYDREFKQFKLFIIQNQILGSYLLQQNRAFAERELQMESFHAAVISQRREELDNTFAKMDRLSGQMEAESSAMEQAKKEMDEGLRQFQNRQVANALFAVLSAVAQIGLAFLTAGATAPGAVASAGQAVSIAGQAAQGLRRVVEILEQLEAVMEVVAAVKDLVDSLEQVGQIVDAPVMPELPSEADWSIFVNEVEAVAEGMPTEVSEVPVWRAKCKNVAALGREMSITAVQMSELQYDIWVQGMMRDMARSQADRLAAIQPADLTNYLEMATQMDMRTTRMLLGLLNILRIQNAALRYEYLLMPTELTTWPLGMDTVGDLLIAQENAALIGLMQLGPSSDFTSRHVVKDIPVNLLLDGEDWEFEIPVQAGMSSFPSSWSRVRIRHLEMHFVKEASGIGGEIIHQPTTQTGTVYILLQGSTIFHDRRRDQVLPFQAAAPLNYHYAYRLDTGDSTLTNEPSEQFANKFMQMTPFTRWRLRLSASAKENAGLAFPTATALDSTTQIVITFHVTAIRQIDWRHDEE

SEQ ID NO: 262 - protein, 867 aa, synthetic construct
  REGION 1..867: note = Synthetic
MALVDYGKLFEDLNQISMGVLDRVEFSEVMVIHRMYVRLADLNVGQLEGAEKVKRLYIFSDIIVLPVVEWRWPPQIPGSVTVIILCRLLQWPTDGRQSDTELHLTFMKLHAIQREENRWEITAADGMNWGVYIHAEEVQVGVLTMSWSSVLRVSALRSVITSGFRAVSVFEVPGSVRSTLGATLRPDHALYSTTMQATPNASHISAFNLRIVSPSAYRVCPLQNDTDTYLGIPADVAAVLPVDVVTDPNILLGMQTTVHIAELVKACHPSPDVVSAVGEHLNWLNKLLLPLKESTQLQGSESYKECLALLGRVHAAMKMVRIGLVVPQLQYRMYGSLINQMAQVAQNYDREFKQFKLFIIQNQILGSYLLQQNRAFAERELQMESFHAAVISQRREELDNTFAKMDRLSGQMEAESSAMEQAKKEMDEGLRQFQNRQVANALFAVLSAVAQIGLAFLTAGATAPGAVASAGQAVSIAGQAAQGLRRVVEILEQLEAVMEVVAAVKDLVDSLEQVGQIVDAPVMPELPSEADWSIFVNEVEAVAEGMPTEVSEVPVWRAKCKNVAALGREMSITAVQMSELQYDIWVQGMMRDMARSQADRLAAIQPADLTNYLEMATQMDMRTTRMLLGLLNILRIQNAALRYEYLLMPTELTTWPLGMDTVGDLLIAQENAALIGLMQLGPSSDFTSRHVVKDIPVNLLLDGEDWEFEIPVQAGMSSFPSSWSRVRIRHLEMHFVKEASGIGGEIIHQPTTQTGTVYILLQGSTIFHDRRRDQVLPFQAAAPLNYHYAYRLDTGDSTLTNEPSEQFANKFMQMTPFTRWRLRLSASAKENAGLAFPTATALDSTTQIVITFHVTAIRQIDWRHDEE

SEQ ID NO: 263 - protein, 867 aa, synthetic construct
  REGION 1..867: note = Synthetic
MALVDYGKLFEDLNQISMGVLDRVEFSEVMVIHRMYVRLADLNVGQLEGAEKVKRLYIFSDILELPVVEWRWPPQIPGSVTVIILCRLLQWPTDGRQSDTELHLTFMKLHAIQREENRWEITAADGMNWGVYIHAEEVQVGVLTMSWSSVLRVSALRSVITSGFRAVSVFEVPGSVRSTLGATLRPDHALYSTTMQATPNASHISAFNLRIVSPSAYRVCPLQNDTDTYLGIPADVAAVLPVDVVTDPNILLGMQTTVHIAELVKACHPSPDVVSAVGEHLNWLNKLLLPLKESTQLQGSESYKECLALLGRVHAAMKMVRIGLVVPQLQYRMYGSLINQMAQVAQNYDREFKQFKLFIIQNQILGSYLLQQNRAFAERELQMESFHAAVISQRREELDNTFAKMDRLSGQMEAESSAMEQAKKEMDEGLRQFQNRQVANALFAVLSAVAQIGLAFLTAGATAPGAVASAGQAVSIAGQAAQGLRRVVEILEQLEAVMEVVAAVKDLVDSLEQVGQIVDAPVMPELPSEADWSIFVNEVEAVAEGMPTEVSEVPVWRAKCKNVAALGREMSITAVQMSELQYDIWVQGMMRDMARSQADRLAAIQPADLTNYLEMATQMDMRTTRMLLGLLNILRIQNAALRYEYLLMPTELTTWPLGMDTVGDLLIAQENAALIGLMQLGPSSDFTSRHVVKDIPVNLLLDGEDWEFEIPVQAGMSSFPSSWSRVRIRHLEMHFVKEASGIGGEIIHQPTTQTGTVYILLQGSTIFHDRRRDQVLPFQAAAPLNYHYAYRLDTGDSTLTNEPSEQFANKFMQMTPFTRWRLRLSASAKENAGLAFPTATALDSTTQIVITFHVTAIRQIDWRHDEE

SEQ ID NO: 264 - protein, 867 aa, synthetic construct
  REGION 1..867: note = Synthetic
MALVDYGKLFEDLNQISMGVLDRVEFSEVMVIHRMYVRLADLNVGQLEGAEKVKRLYIFSDVIVLPVVEWRWPPQIPGSVTVIILCRLLQWPTDGRQSDTELHLTFMKLHAIQREENRWEITAADGMNWGVYIHAEEVQVGVLTMSWSSVLRVSALRSVITSGFRAVSVFEVPGSVRSTLGATLRPDHALYSTTMQATPNASHISAFNLRIVSPSAYRVCPLQNDTDTYLGIPADVAAVLPVDVVTDPNILLGMQTTVHIAELVKACHPSPDVVSAVGEHLNWLNKLLLPLKESTQLQGSESYKECLALLGRVHAAMKMVRIGLVVPQLQYRMYGSLINQMAQVAQNYDREFKQFKLFIIQNQILGSYLLQQNRAFAERELQMESFHAAVISQRREELDNTFAKMDRLSGQMEAESSAMEQAKKEMDEGLRQFQNRQVANALFAVLSAVAQIGLAFLTAGATAPGAVASAGQAVSIAGQAAQGLRRVVEILEQLEAVMEVVAAVKDLVDSLEQVGQIVDAPVMPELPSEADWSIFVNEVEAVAEGMPTEVSEVPVWRAKCKNVAALGREMSITAVQMSELQYDIWVQGMMRDMARSQADRLAAIQPADLTNYLEMATQMDMRTTRMLLGLLNILRIQNAALRYEYLLMPTELTTWPLGMDTVGDLLIAQENAALIGLMQLGPSSDFTSRHVVKDIPVNLLLDGEDWEFEIPVQAGMSSFPSSWSRVRIRHLEMHFVKEASGIGGEIIHQPTTQTGTVYILLQGSTIFHDRRRDQVLPFQAAAPLNYHYAYRLDTGDSTLTNEPSEQFANKFMQMTPFTRWRLRLSASAKENAGLAFPTATALDSTTQIVITFHVTAIRQIDWRHDEE

SEQ ID NO: 265 - protein, 867 aa, synthetic construct
  REGION 1..867: note = Synthetic
MALVDYGKLFEDLNQISMGVLDRVEFSEVMVIHRMYVRLADLNVGQLEGAEKVKRLYIFTDVIELPVVEWRWPPQIPGSVTVIILCRLLQWPTDGRQSDTELHLTFMKLHAIQREENRWEITAADGMNWGVYIHAEEVQVGVLTMSWSSVLRVSALRSVITSGFRAVSVFEVPGSVRSTLGATLRPDHALYSTTMQATPNASHISAFNLRIVSPSAYRVCPLQNDTDTYLGIPADVAAVLPVDVVTDPNILLGMQTTVHIAELVKACHPSPDVVSAVGEHLNWLNKLLLPLKESTQLQGSESYKECLALLGRVHAAMKMVRIGLVVPQLQYRMYGSLINQMAQVAQNYDREFKQFKLFIIQNQILGSYLLQQNRAFAERELQMESFHAAVISQRREELDNTFAKMDRLSGQMEAESSAMEQAKKEMDEGLRQFQNRQVANALFAVLSAVAQIGLAFLTAGATAPGAVASAGQAVSIAGQAAQGLRRVVEILEQLEAVMEVVAAVKDLVDSLEQVGQIVDAPVMPELPSEADWSIFVNEVEAVAEGMPTEVSEVPVWRAKCKNVAALGREMSITAVQMSELQYDIWVQGMMRDMARSQADRLAAIQPADLTNYLEMATQMDMRTTRMLLGLLNILRIQNAALRYEYLLMPTELTTWPLGMDTVGDLLIAQENAALIGLMQLGPSSDFTSRHVVKDIPVNLLLDGEDWEFEIPVQAGMSSFPSSWSRVRIRHLEMHFVKEASGIGGEIIHQPTTQTGTVYILLQGSTIFHDRRRDQVLPFQAAAPLNYHYAYRLDTGDSTLTNEPSEQFANKFMQMTPFTRWRLRLSASAKENAGLAFPTATALDSTTQIVITFHVTAIRQIDWRHDEE

SEQ ID NO: 266 - protein, 867 aa, synthetic construct
  REGION 1..867: note = Synthetic
MALVDYGKLFEDLNQISMGVLDRVEFSEVMVIHRMYVRLADLNVGQLEGAEKVKRLYVFCDIIELPVVEWRWPPQIPGSVTVIILCRLLQWPTDGRQSDTELHLTFMKLHAIQREENRWEITAADGMNWGVYIHAEEVQVGVLTMSWSSVLRVSALRSVITSGFRAVSVFEVPGSVRSTLGATLRPDHALYSTTMQATPNASHISAFNLRIVSPSAYRVCPLQNDTDTYLGIPADVAAVLPVDVVTDPNILLGMQTTVHIAELVKACHPSPDVVSAVGEHLNWLNKLLLPLKESTQLQGSESYKECLALLGRVHAAMKMVRIGLVVPQLQYRMYGSLINQMAQVAQNYDREFKQFKLFIIQNQILGSYLLQQNRAFAERELQMESFHAAVISQRREELDNTFAKMDRLSGQMEAESSAMEQAKKEMDEGLRQFQNRQVANALFAVLSAVAQIGLAFLTAGATAPGAVASAGQAVSIAGQAAQGLRRVVEILEQLEAVMEVVAAVKDLVDSLEQVGQIVDAPVMPELPSEADWSIFVNEVEAVAEGMPTEVSEVPVWRAKCKNVAALGREMSITAVQMSELQYDIWVQGMMRDMARSQADRLAAIQPADLTNYLEMATQMDMRTTRMLLGLLNILRIQNAALRYEYLLMPTELTTWPLGMDTVGDLLIAQENAALIGLMQLGPSSDFTSRHVVKDIPVNLLLDGEDWEFEIPVQAGMSSFPSSWSRVRIRHLEMHFVKEASGIGGEIIHQPTTQTGTVYILLQGSTIFHDRRRDQVLPFQAAAPLNYHYAYRLDTGDSTLTNEPSEQFANKFMQMTPFTRWRLRLSASAKENAGLAFPTATALDSTTQIVITFHVTAIRQIDWRHDEE

SEQ ID NO: 267 - protein, 867 aa, synthetic construct
  REGION 1..867: note = Synthetic
MALVDYGKLFEDLNQISMGVLDRVEFSEVMVIHRMYVRLADLNVGQLEGAEKVKRLYVFCDIIVLPVVEWRWPPQIPGSVTVIILCRLLQWPTDGRQSDTELHLTFMKLHAIQREENRWEITAADGMNWGVYIHAEEVQVGVLTMSWSSVLRVSALRSVITSGFRAVSVFEVPGSVRSTLGATLRPDHALYSTTMQATPNASHISAFNLRIVSPSAYRVCPLQNDTDTYLGIPADVAAVLPVDVVTDPNILLGMQTTVHIAELVKACHPSPDVVSAVGEHLNWLNKLLLPLKESTQLQGSESYKECLALLGRVHAAMKMVRIGLVVPQLQYRMYGSLINQMAQVAQNYDREFKQFKLFIIQNQILGSYLLQQNRAFAERELQMESFHAAVISQRREELDNTFAKMDRLSGQMEAESSAMEQAKKEMDEGLRQFQNRQVANALFAVLSAVAQIGLAFLTAGATAPGAVASAGQAVSIAGQAAQGLRRVVEILEQLEAVMEVVAAVKDLVDSLEQVGQIVDAPVMPELPSEADWSIFVNEVEAVAEGMPTEVSEVPVWRAKCKNVAALGREMSITAVQMSELQYDIWVQGMMRDMARSQADRLAAIQPADLTNYLEMATQMDMRTTRMLLGLLNILRIQNAALRYEYLLMPTELTTWPLGMDTVGDLLIAQENAALIGLMQLGPSSDFTSRHVVKDIPVNLLLDGEDWEFEIPVQAGMSSFPSSWSRVRIRHLEMHFVKEASGIGGEIIHQPTTQTGTVYILLQGSTIFHDRRRDQVLPFQAAAPLNYHYAYRLDTGDSTLTNEPSEQFANKFMQMTPFTRWRLRLSASAKENAGLAFPTATALDSTTQIVITFHVTAIRQIDWRHDEE

SEQ ID NO: 268 - protein, 867 aa, synthetic construct
  REGION 1..867: note = Synthetic
MALVDYGKLFEDLNQISMGVLDRVEFSEVMVIHRMYVRLADLNVGQLEGAEKVKRLYVFGDIVELPVVEWRWPPQIPGSVTVIILCRLLQWPTDGRQSDTELHLTFMKLHAIQREENRWEITAADGMNWGVYIHAEEVQVGVLTMSWSSVLRVSALRSVITSGFRAVSVFEVPGSVRSTLGATLRPDHALYSTTMQATPNASHISAFNLRIVSPSAYRVCPLQNDTDTYLGIPADVAAVLPVDVVTDPNILLGMQTTVHIAELVKACHPSPDVVSAVGEHLNWLNKLLLPLKESTQLQGSESYKECLALLGRVHAAMKMVRIGLVVPQLQYRMYGSLINQMAQVAQNYDREFKQFKLFIIQNQILGSYLLQQNRAFAERELQMESFHAAVISQRREELDNTFAKMDRLSGQMEAESSAMEQAKKEMDEGLRQFQNRQVANALFAVLSAVAQIGLAFLTAGATAPGAVASAGQAVSIAGQAAQGLRRVVEILEQLEAVMEVVAAVKDLVDSLEQVGQIVDAPVMPELPSEADWSIFVNEVEAVAEGMPTEVSEVPVWRAKCKNVAALGREMSITAVQMSELQYDIWVQGMMRDMARSQADRLAAIQPADLTNYLEMATQMDMRTTRMLLGLLNILRIQNAALRYEYLLMPTELTTWPLGMDTVGDLLIAQENAALIGLMQLGPSSDFTSRHVVKDIPVNLLLDGEDWEFEIPVQAGMSSFPSSWSRVRIRHLEMHFVKEASGIGGEIIHQPTTQTGTVYILLQGSTIFHDRRRDQVLPFQAAAPLNYHYAYRLDTGDSTLTNEPSEQFANKFMQMTPFTRWRLRLSASAKENAGLAFPTATALDSTTQIVITFHVTAIRQIDWRHDEE

SEQ ID NO: 269 - protein, 867 aa, synthetic construct
  REGION 1..867: note = Synthetic
MALVDYGKLFEDLNQISMGVLDRVEFSEVMVIHRMYVRLADLNVGQLEGAEKVKRLYVFGDVVELPVVEWRWPPQIPGSVTVIILCRLLQWPTDGRQSDTELHLTFMKLHAIQREENRWEITAADGMNWGVYIHAEEVQVGVLTMSWSSVLRVSALRSVITSGFRAVSVFEVPGSVRSTLGATLRPDHALYSTTMQATPNASHISAFNLRIVSPSAYRVCPLQNDTDTYLGIPADVAAVLPVDVVTDPNILLGMQTTVHIAELVKACHPSPDVVSAVGEHLNWLNKLLLPLKESTQLQGSESYKECLALLGRVHAAMKMVRIGLVVPQLQYRMYGSLINQMAQVAQNYDREFKQFKLFIIQNQILGSYLLQQNRAFAERELQMESFHAAVISQRREELDNTFAKMDRLSGQMEAESSAMEQAKKEMDEGLRQFQNRQVANALFAVLSAVAQIGLAFLTAGATAPGAVASAGQAVSIAGQAAQGLRRVVEILEQLEAVMEVVAAVKDLVDSLEQVGQIVDAPVMPELPSEADWSIFVNEVEAVAEGMPTEVSEVPVWRAKCKNVAALGREMSITAVQMSELQYDIWVQGMMRDMARSQADRLAAIQPADLTNYLEMATQMDMRTTRMLLGLLNILRIQNAALRYEYLLMPTELTTWPLGMDTVGDLLIAQENAALIGLMQLGPSSDFTSRHVVKDIPVNLLLDGEDWEFEIPVQAGMSSFPSSWSRVRIRHLEMHFVKEASGIGGEIIHQPTTQTGTVYILLQGSTIFHDRRRDQVLPFQAAAPLNYHYAYRLDTGDSTLTNEPSEQFANKFMQMTPFTRWRLRLSASAKENAGLAFPTATALDSTTQIVITFHVTAIRQIDWRHDEE

SEQ ID NO: 270 - protein, 867 aa, synthetic construct
  REGION 1..867: note = Synthetic
MALVDYGKLFEDLNQISMGVLDRVEFSEVMVIHRMYVRLADLNVGQLEGAEKVKRLYVFSDIIELPVVEWRWPPQIPGSVTVIILCRLLQWPTDGRQSDTELHLTFMKLHAIQREENRWEITAADGMNWGVYIHAEEVQVGVLTMSWSSVLRVSALRSVITSGFRAVSVFEVPGSVRSTLGATLRPDHALYSTTMQATPNASHISAFNLRIVSPSAYRVCPLQNDTDTYLGIPADVAAVLPVDVVTDPNILLGMQTTVHIAELVKACHPSPDVVSAVGEHLNWLNKLLLPLKESTQLQGSESYKECLALLGRVHAAMKMVRIGLVVPQLQYRMYGSLINQMAQVAQNYDREFKQFKLFIIQNQILGSYLLQQNRAFAERELQMESFHAAVISQRREELDNTFAKMDRLSGQMEAESSAMEQAKKEMDEGLRQFQNRQVANALFAVLSAVAQIGLAFLTAGATAPGAVASAGQAVSIAGQAAQGLRRVVEILEQLEAVMEVVAAVKDLVDSLEQVGQIVDAPVMPELPSEADWSIFVNEVEAVAEGMPTEVSEVPVWRAKCKNVAALGREMSITAVQMSELQYDIWVQGMMRDMARSQADRLAAIQPADLTNYLEMATQMDMRTTRMLLGLLNILRIQNAALRYEYLLMPTELTTWPLGMDTVGDLLIAQENAALIGLMQLGPSSDFTSRHVVKDIPVNLLLDGEDWEFEIPVQAGMSSFPSSWSRVRIRHLEMHFVKEASGIGGEIIHQPTTQTGTVYILLQGSTIFHDRRRDQVLPFQAAAPLNYHYAYRLDTGDSTLTNEPSEQFANKFMQMTPFTRWRLRLSASAKENAGLAFPTATALDSTTQIVITFHVTAIRQIDWRHDEE

SEQ ID NO: 271 - protein, 867 aa, synthetic construct
  REGION 1..867: note = Synthetic
MALVDYGKLFEDLNQISMGVLDRVEFSEVMVIHRMYVRLADLNVGQLEGAEKVKRLYVFSDIVELPVVEWRWPPQIPGSVTVIILCRLLQWPTDGRQSDTELHLTFMKLHAIQREENRWEITAADGMNWGVYIHAEEVQVGVLTMSWSSVLRVSALRSVITSGFRAVSVFEVPGSVRSTLGATLRPDHALYSTTMQATPNASHISAFNLRIVSPSAYRVCPLQNDTDTYLGIPADVAAVLPVDVVTDPNILLGMQTTVHIAELVKACHPSPDVVSAVGEHLNWLNKLLLPLKESTQLQGSESYKECLALLGRVHAAMKMVRIGLVVPQLQYRMYGSLINQMAQVAQNYDREFKQFKLFIIQNQILGSYLLQQNRAFAERELQMESFHAAVISQRREELDNTFAKMDRLSGQMEAESSAMEQAKKEMDEGLRQFQNRQVANALFAVLSAVAQIGLAFLTAGATAPGAVASAGQAVSIAGQAAQGLRRVVEILEQLEAVMEVVAAVKDLVDSLEQVGQIVDAPVMPELPSEADWSIFVNEVEAVAEGMPTEVSEVPVWRAKCKNVAALGREMSITAVQMSELQYDIWVQGMMRDMARSQADRLAAIQPADLTNYLEMATQMDMRTTRMLLGLLNILRIQNAALRYEYLLMPTELTTWPLGMDTVGDLLIAQENAALIGLMQLGPSSDFTSRHVVKDIPVNLLLDGEDWEFEIPVQAGMSSFPSSWSRVRIRHLEMHFVKEASGIGGEIIHQPTTQTGTVYILLQGSTIFHDRRRDQVLPFQAAAPLNYHYAYRLDTGDSTLTNEPSEQFANKFMQMTPFTRWRLRLSASAKENAGLAFPTATALDSTTQIVITFHVTAIRQIDWRHDEE

SEQ ID NO: 272 - protein, 867 aa, synthetic construct
  REGION 1..867: note = Synthetic
MALVDYGKLFEDLNQISMGVLDRVEFSEVMVIHRMYVRLADLNVGQLEGAEKVKRLYVFSDVIELPVVEWRWPPQIPGSVTVIILCRLLQWPTDGRQSDTELHLTFMKLHAIQREENRWEITAADGMNWGVYIHAEEVQVGVLTMSWSSVLRVSALRSVITSGFRAVSVFEVPGSVRSTLGATLRPDHALYSTTMQATPNASHISAFNLRIVSPSAYRVCPLQNDTDTYLGIPADVAAVLPVDVVTDPNILLGMQTTVHIAELVKACHPSPDVVSAVGEHLNWLNKLLLPLKESTQLQGSESYKECLALLGRVHAAMKMVRIGLVVPQLQYRMYGSLINQMAQVAQNYDREFKQFKLFIIQNQILGSYLLQQNRAFAERELQMESFHAAVISQRREELDNTFAKMDRLSGQMEAESSAMEQAKKEMDEGLRQFQNRQVANALFAVLSAVAQIGLAFLTAGATAPGAVASAGQAVSIAGQAAQGLRRVVEILEQLEAVMEVVAAVKDLVDSLEQVGQIVDAPVMPELPSEADWSIFVNEVEAVAEGMPTEVSEVPVWRAKCKNVAALGREMSITAVQMSELQYDIWVQGMMRDMARSQADRLAAIQPADLTNYLEMATQMDMRTTRMLLGLLNILRIQNAALRYEYLLMPTELTTWPLGMDTVGDLLIAQENAALIGLMQLGPSSDFTSRHVVKDIPVNLLLDGEDWEFEIPVQAGMSSFPSSWSRVRIRHLEMHFVKEASGIGGEIIHQPTTQTGTVYILLQGSTIFHDRRRDQVLPFQAAAPLNYHYAYRLDTGDSTLTNEPSEQFANKFMQMTPFTRWRLRLSASAKENAGLAFPTATALDSTTQIVITFHVTAIRQIDWRHDEE

SEQ ID NO: 273 - protein, 867 aa, synthetic construct
  REGION 1..867: note = Synthetic
MALVDYGKLFEDLNQISMGVLDRVEFSEVMVIHRMYVRLADLNVGQLEGAEKVKRLYVFTDVIVLPVVEWRWPPQIPGSVTVIILCRLLQWPTDGRQSDTELHLTFMKLHAIQREENRWEITAADGMNWGVYIHAEEVQVGVLTMSWSSVLRVSALRSVITSGFRAVSVFEVPGSVRSTLGATLRPDHALYSTTMQATPNASHISAFNLRIVSPSAYRVCPLQNDTDTYLGIPADVAAVLPVDVVTDPNILLGMQTTVHIAELVKACHPSPDVVSAVGEHLNWLNKLLLPLKESTQLQGSESYKECLALLGRVHAAMKMVRIGLVVPQLQYRMYGSLINQMAQVAQNYDREFKQFKLFIIQNQILGSYLLQQNRAFAERELQMESFHAAVISQRREELDNTFAKMDRLSGQMEAESSAMEQAKKEMDEGLRQFQNRQVANALFAVLSAVAQIGLAFLTAGATAPGAVASAGQAVSIAGQAAQGLRRVVEILEQLEAVMEVVAAVKDLVDSLEQVGQIVDAPVMPELPSEADWSIFVNEVEAVAEGMPTEVSEVPVWRAKCKNVAALGREMSITAVQMSELQYDIWVQGMMRDMARSQADRLAAIQPADLTNYLEMATQMDMRTTRMLLGLLNILRIQNAALRYEYLLMPTELTTWPLGMDTVGDLLIAQENAALIGLMQLGPSSDFTSRHVVKDIPVNLLLDGEDWEFEIPVQAGMSSFPSSWSRVRIRHLEMHFVKEASGIGGEIIHQPTTQTGTVYILLQGSTIFHDRRRDQVLPFQAAAPLNYHYAYRLDTGDSTLTNEPSEQFANKFMQMTPFTRWRLRLSASAKENAGLAFPTATALDSTTQIVITFHVTAIRQIDWRHDEE

SEQ ID NO: 274 - protein, 867 aa, synthetic construct
  REGION 1..867: note = Synthetic
MALVDYGKLFEDLNQISMGVLDRVEFSEVMVIHRMYVRLADLNVGQLEGAEKVKRLYVFTDVVVLPVVEWRWPPQIPGSVTVIILCRLLQWPTDGRQSDTELHLTFMKLHAIQREENRWEITAADGMNWGVYIHAEEVQVGVLTMSWSSVLRVSALRSVITSGFRAVSVFEVPGSVRSTLGATLRPDHALYSTTMQATPNASHISAFNLRIVSPSAYRVCPLQNDTDTYLGIPADVAAVLPVDVVTDPNILLGMQTTVHIAELVKACHPSPDVVSAVGEHLNWLNKLLLPLKESTQLQGSESYKECLALLGRVHAAMKMVRIGLVVPQLQYRMYGSLINQMAQVAQNYDREFKQFKLFIIQNQILGSYLLQQNRAFAERELQMESFHAAVISQRREELDNTFAKMDRLSGQMEAESSAMEQAKKEMDEGLRQFQNRQVANALFAVLSAVAQIGLAFLTAGATAPGAVASAGQAVSIAGQAAQGLRRVVEILEQLEAVMEVVAAVKDLVDSLEQVGQIVDAPVMPELPSEADWSIFVNEVEAVAEGMPTEVSEVPVWRAKCKNVAALGREMSITAVQMSELQYDIWVQGMMRDMARSQADRLAAIQPADLTNYLEMATQMDMRTTRMLLGLLNILRIQNAALRYEYLLMPTELTTWPLGMDTVGDLLIAQENAALIGLMQLGPSSDFTSRHVVKDIPVNLLLDGEDWEFEIPVQAGMSSFPSSWSRVRIRHLEMHFVKEASGIGGEIIHQPTTQTGTVYILLQGSTIFHDRRRDQVLPFQAAAPLNYHYAYRLDTGDSTLTNEPSEQFANKFMQMTPFTRWRLRLSASAKENAGLAFPTATALDSTTQIVITFHVTAIRQIDWRHDEE

SEQ ID NO: 275 - protein, 867 aa, synthetic construct
  REGION 1..867: note = Synthetic
MALVDYGKLFEDLNQISMGVLDRVEFSEVMVIHRMYVRLADLNVGQLEGAEKVMHLYIFADVIELPVVEWRWPPQIPGSVTVIILCRLLQWPTDGRQSDTELHLTFMKLHAIQREENRWEITAADGMNWGVYIHAEEVQVGVLTMSWSSVLRVSALRSVITSGFRAVSVFEVPGSVRSTLGATLRPDHALYSTTMQATPNASHISAFNLRIVSPSAYRVCPLQNDTDTYLGIPADVAAVLPVDVVTDPNILLGMQTTVHIAELVKACHPSPDVVSAVGEHLNWLNKLLLPLKESTQLQGSESYKECLALLGRVHAAMKMVRIGLVVPQLQYRMYGSLINQMAQVAQNYDREFKQFKLFIIQNQILGSYLLQQNRAFAERELQMESFHAAVISQRREELDNTFAKMDRLSGQMEAESSAMEQAKKEMDEGLRQFQNRQVANALFAVLSAVAQIGLAFLTAGATAPGAVASAGQAVSIAGQAAQGLRRVVEILEQLEAVMEVVAAVKDLVDSLEQVGQIVDAPVMPELPSEADWSIFVNEVEAVAEGMPTEVSEVPVWRAKCKNVAALGREMSITAVQMSELQYDIWVQGMMRDMARSQADRLAAIQPADLTNYLEMATQMDMRTTRMLLGLLNILRIQNAALRYEYLLMPTELTTWPLGMDTVGDLLIAQENAALIGLMQLGPSSDFTSRHVVKDIPVNLLLDGEDWEFEIPVQAGMSSFPSSWSRVRIRHLEMHFVKEASGIGGEIIHQPTTQTGTVYILLQGSTIFHDRRRDQVLPFQAAAPLNYHYAYRLDTGDSTLTNEPSEQFANKFMQMTPFTRWRLRLSASAKENAGLAFPTATALDSTTQIVITFHVTAIRQIDWRHDEE

SEQ ID NO: 276 - protein, 867 aa, synthetic construct
  REGION 1..867: note = Synthetic
MALVDYGKLFEDLNQISMGVLDRVEFSEVMVIHRMYVRLADLNVGQLEGAEKVMQLYIFCDILELPVVEWRWPTQIPGSVTVIILCRLLQWPTDGRQSDTELHLTFMKLHAIQREENRWEITAADGMNWGVYIHAEEVQVGVLTMSWSSVLRVSALRSVITSGFRAVSVFEVPGSVRSTLGATLRPDHALYSTTMQATPNASHISAFNLRIVSPSAYRVCPLQNDTDTYLGIPADVAAVLPVDVVTDPNILLGMQTTVHIAELVKACHPSPDVVSAVGEHLNWLNKLLLPLKESTQLQGSESYKECLALLGRVHAAMKMVRIGLVVPQLQYRMYGSLINQMAQVAQNYDREFKQFKLFIIQNQILGSYLLQQNRAFAERELQMESFHAAVISQRREELDNTFAKMDRLSGQMEAESSAMEQAKKEMDEGLRQFQNRQVANALFAVLSAVAQIGLAFLTAGATAPGAVASAGQAVSIAGQAAQGLRRVVEILEQLEAVMEVVAAVKDLVDSLEQVGQIVDAPVMPELPSEADWSIFVNEVEAVAEGMPTEVSEVPVWRAKCKNVAALGREMSITAVQMSELQYDIWVQGMMRDMARSQADRLAAIQPADLTNYLEMATQMDMRTTRMLLGLLNILRIQNAALRYEYLLMPTELTTWPLGMDTVGDLLIAQENAALIGLMQLGPSSDFTSRHVVKDIPVNLLLDGEDWEFEIPVQAGMSSFPSSWSRVRIRHLEMHFVKEASGIGGEIIHQPTTQTGTVYILLQGSTIFHDRRRDQVLPFQAAAPLNYHYAYRLDTGDSTLTNEPSEQFANKFMQMTPFTRWRLRLSASAKENAGLAFPTATALDSTTQIVITFHVTAIRQIDWRHDEE

SEQ ID NO: 277 - protein, 867 aa, synthetic construct
  REGION 1..867: note = Synthetic
MALVDYGKLFEDLNQISMGVLDRVEFSEVMVIHRMYVRLADLNVGQLEGAEKVMRLYIFADVVVLPVVEWRWPPQIPGSVTVIILCRLLQWPTDGRQSDTELHLTFMKLHAIQREENRWEITAADGMNWGVYIHAEEVQVGVLTMSWSSVLRVSALRSVITSGFRAVSVFEVPGSVRSTLGATLRPDHALYSTTMQATPNASHISAFNLRIVSPSAYRVCPLQNDTDTYLGIPADVAAVLPVDVVTDPNILLGMQTTVHIAELVKACHPSPDVVSAVGEHLNWLNKLLLPLKESTQLQGSESYKECLALLGRVHAAMKMVRIGLVVPQLQYRMYGSLINQMAQVAQNYDREFKQFKLFIIQNQILGSYLLQQNRAFAERELQMESFHAAVISQRREELDNTFAKMDRLSGQMEAESSAMEQAKKEMDEGLRQFQNRQVANALFAVLSAVAQIGLAFLTAGATAPGAVASAGQAVSIAGQAAQGLRRVVEILEQLEAVMEVVAAVKDLVDSLEQVGQIVDAPVMPELPSEADWSIFVNEVEAVAEGMPTEVSEVPVWRAKCKNVAALGREMSITAVQMSELQYDIWVQGMMRDMARSQADRLAAIQPADLTNYLEMATQMDMRTTRMLLGLLNILRIQNAALRYEYLLMPTELTTWPLGMDTVGDLLIAQENAALIGLMQLGPSSDFTSRHVVKDIPVNLLLDGEDWEFEIPVQAGMSSFPSSWSRVRIRHLEMHFVKEASGIGGEIIHQPTTQTGTVYILLQGSTIFHDRRRDQVLPFQAAAPLNYHYAYRLDTGDSTLTNEPSEQFANKFMQMTPFTRWRLRLSASAKENAGLAFPTATALDSTTQIVITFHVTAIRQIDWRHDEE

SEQ ID NO: 278 - protein, 867 aa, synthetic construct
  REGION 1..867: note = Synthetic
MALVDYGKLFEDLNQISMGVLDRVEFSEVMVIHRMYVRLADLNVGQLEGAEKVMRLYIFCDVIELPVVEWRWPPQIPGSVTVIILCRLLQWPTDGRQSDTELHLTFMKLHAIQREENRWEITAADGMNWGVYIHAEEVQVGVLTMSWSSVLRVSALRSVITSGFRAVSVFEVPGSVRSTLGATLRPDHALYSTTMQATPNASHISAFNLRIVSPSAYRVCPLQNDTDTYLGIPADVAAVLPVDVVTDPNILLGMQTTVHIAELVKACHPSPDVVSAVGEHLNWLNKLLLPLKESTQLQGSESYKECLALLGRVHAAMKMVRIGLVVPQLQYRMYGSLINQMAQVAQNYDREFKQFKLFIIQNQILGSYLLQQNRAFAERELQMESFHAAVISQRREELDNTFAKMDRLSGQMEAESSAMEQAKKEMDEGLRQFQNRQVANALFAVLSAVAQIGLAFLTAGATAPGAVASAGQAVSIAGQAAQGLRRVVEILEQLEAVMEVVAAVKDLVDSLEQVGQIVDAPVMPELPSEADWSIFVNEVEAVAEGMPTEVSEVPVWRAKCKNVAALGREMSITAVQMSELQYDIWVQGMMRDMARSQADRLAAIQPADLTNYLEMATQMDMRTTRMLLGLLNILRIQNAALRYEYLLMPTELTTWPLGMDTVGDLLIAQENAALIGLMQLGPSSDFTSRHVVKDIPVNLLLDGEDWEFEIPVQAGMSSFPSSWSRVRIRHLEMHFVKEASGIGGEIIHQPTTQTGTVYILLQGSTIFHDRRRDQVLPFQAAAPLNYHYAYRLDTGDSTLTNEPSEQFANKFMQMTPFTRWRLRLSASAKENAGLAFPTATALDSTTQIVITFHVTAIRQIDWRHDEE

SEQ ID NO: 279 - protein, 867 aa, synthetic construct
  REGION 1..867: note = Synthetic
MALVDYGKLFEDLNQISMGVLDRVEFSEVMVIHRMYVRLADLNVGQLEGAEKVMRLYVFCDIIELPVVEWRWPPQIPGSVTVIILCRLLQWPTDGRQSDTELHLTFMKLHAIQREENRWEITAADGMNWGVYIHAEEVQVGVLTMSWSSVLRVSALRSVITSGFRAVSVFEVPGSVRSTLGATLRPDHALYSTTMQATPNASHISAFNLRIVSPSAYRVCPLQNDTDTYLGIPADVAAVLPVDVVTDPNILLGMQTTVHIAELVKACHPSPDVVSAVGEHLNWLNKLLLPLKESTQLQGSESYKECLALLGRVHAAMKMVRIGLVVPQLQYRMYGSLINQMAQVAQNYDREFKQFKLFIIQNQILGSYLLQQNRAFAERELQMESFHAAVISQRREELDNTFAKMDRLSGQMEAESSAMEQAKKEMDEGLRQFQNRQVANALFAVLSAVAQIGLAFLTAGATAPGAVASAGQAVSIAGQAAQGLRRVVEILEQLEAVMEVVAAVKDLVDSLEQVGQIVDAPVMPELPSEADWSIFVNEVEAVAEGMPTEVSEVPVWRAKCKNVAALGREMSITAVQMSELQYDIWVQGMMRDMARSQADRLAAIQPADLTNYLEMATQMDMRTTRMLLGLLNILRIQNAALRYEYLLMPTELTTWPLGMDTVGDLLIAQENAALIGLMQLGPSSDFTSRHVVKDIPVNLLLDGEDWEFEIPVQAGMSSFPSSWSRVRIRHLEMHFVKEASGIGGEIIHQPTTQTGTVYILLQGSTIFHDRRRDQVLPFQAAAPLNYHYAYRLDTGDSTLTNEPSEQFANKFMQMTPFTRWRLRLSASAKENAGLAFPTATALDSTTQIVITFHVTAIRQIDWRHDEE

SEQ ID NO: 280 - protein, 867 aa, synthetic construct
  REGION 1..867: note = Synthetic
MALVDYGKLFEDLNQISMGVLDRVEFSEVMVIHRMYVRLADLNVGQLEGAEKVMRLYVFCDILVLPVVEWRWPPQIPGSVTVIILCRLLQWPTDGRQSDTELHLTFMKLHAIQREENRWEITAADGMNWGVYIHAEEVQVGVLTMSWSSVLRVSALRSVITSGFRAVSVFEVPGSVRSTLGATLRPDHALYSTTMQATPNASHISAFNLRIVSPSAYRVCPLQNDTDTYLGIPADVAAVLPVDVVTDPNILLGMQTTVHIAELVKACHPSPDVVSAVGEHLNWLNKLLLPLKESTQLQGSESYKECLALLGRVHAAMKMVRIGLVVPQLQYRMYGSLINQMAQVAQNYDREFKQFKLFIIQNQILGSYLLQQNRAFAERELQMESFHAAVISQRREELDNTFAKMDRLSGQMEAESSAMEQAKKEMDEGLRQFQNRQVANALFAVLSAVAQIGLAFLTAGATAPGAVASAGQAVSIAGQAAQGLRRVVEILEQLEAVMEVVAAVKDLVDSLEQVGQIVDAPVMPELPSEADWSIFVNEVEAVAEGMPTEVSEVPVWRAKCKNVAALGREMSITAVQMSELQYDIWVQGMMRDMARSQADRLAAIQPADLTNYLEMATQMDMRTTRMLLGLLNILRIQNAALRYEYLLMPTELTTWPLGMDTVGDLLIAQENAALIGLMQLGPSSDFTSRHVVKDIPVNLLLDGEDWEFEIPVQAGMSSFPSSWSRVRIRHLEMHFVKEASGIGGEIIHQPTTQTGTVYILLQGSTIFHDRRRDQVLPFQAAAPLNYHYAYRLDTGDSTLTNEPSEQFANKFMQMTPFTRWRLRLSASAKENAGLAFPTATALDSTTQIVITFHVTAIRQIDWRHDEE

SEQ ID NO: 281 - protein, 867 aa, synthetic construct
  REGION 1..867: note = Synthetic
MALVDYGKLFEDLNQISMGVLDRVEFSEVMVIHRMYVRLADLNVGQLEGAEKVMRLYVFSDIIVLPVVEWRWPPQIPGSVTVIILCRLLQWPTDGRQSDTELHLTFMKLHAIQREENRWEITAADGMNWGVYIHAEEVQVGVLTMSWSSVLRVSALRSVITSGFRAVSVFEVPGSVRSTLGATLRPDHALYSTTMQATPNASHISAFNLRIVSPSAYRVCPLQNDTDTYLGIPADVAAVLPVDVVTDPNILLGMQTTVHIAELVKACHPSPDVVSAVGEHLNWLNKLLLPLKESTQLQGSESYKECLALLGRVHAAMKMVRIGLVVPQLQYRMYGSLINQMAQVAQNYDREFKQFKLFIIQNQILGSYLLQQNRAFAERELQMESFHAAVISQRREELDNTFAKMDRLSGQMEAESSAMEQAKKEMDEGLRQFQNRQVANALFAVLSAVAQIGLAFLTAGATAPGAVASAGQAVSIAGQAAQGLRRVVEILEQLEAVMEVVAAVKDLVDSLEQVGQIVDAPVMPELPSEADWSIFVNEVEAVAEGMPTEVSEVPVWRAKCKNVAALGREMSITAVQMSELQYDIWVQGMMRDMARSQADRLAAIQPADLTNYLEMATQMDMRTTRMLLGLLNILRIQNAALRYEYLLMPTELTTWPLGMDTVGDLLIAQENAALIGLMQLGPSSDFTSRHVVKDIPVNLLLDGEDWEFEIPVQAGMSSFPSSWSRVRIRHLEMHFVKEASGIGGEIIHQPTTQTGTVYILLQGSTIFHDRRRDQVLPFQAAAPLNYHYAYRLDTGDSTLTNEPSEQFANKFMQMTPFTRWRLRLSASAKENAGLAFPTATALDSTTQIVITFHVTAIRQIDWRHDEE

SEQ ID NO: 282 - protein, 867 aa, synthetic construct
  REGION 1..867: note = Synthetic
MALVDYGKLFEDLNQISMGVLDRVEFSEVMVIHRMYVRLADLNVGQLEGAEKVRHLYIFADIIELPVVEWRWPPQIPGSVTVIILCRLLQWPTDGRQSDTELHLTFMKLHAIQREENRWEITAADGMNWGVYIHAEEVQVGVLTMSWSSVLRVSALRSVITSGFRAVSVFEVPGSVRSTLGATLRPDHALYSTTMQATPNASHISAFNLRIVSPSAYRVCPLQNDTDTYLGIPADVAAVLPVDVVTDPNILLGMQTTVHIAELVKACHPSPDVVSAVGEHLNWLNKLLLPLKESTQLQGSESYKECLALLGRVHAAMKMVRIGLVVPQLQYRMYGSLINQMAQVAQNYDREFKQFKLFIIQNQILGSYLLQQNRAFAERELQMESFHAAVISQRREELDNTFAKMDRLSGQMEAESSAMEQAKKEMDEGLRQFQNRQVANALFAVLSAVAQIGLAFLTAGATAPGAVASAGQAVSIAGQAAQGLRRVVEILEQLEAVMEVVAAVKDLVDSLEQVGQIVDAPVMPELPSEADWSIFVNEVEAVAEGMPTEVSEVPVWRAKCKNVAALGREMSITAVQMSELQYDIWVQGMMRDMARSQADRLAAIQPADLTNYLEMATQMDMRTTRMLLGLLNILRIQNAALRYEYLLMPTELTTWPLGMDTVGDLLIAQENAALIGLMQLGPSSDFTSRHVVKDIPVNLLLDGEDWEFEIPVQAGMSSFPSSWSRVRIRHLEMHFVKEASGIGGEIIHQPTTQTGTVYILLQGSTIFHDRRRDQVLPFQAAAPLNYHYAYRLDTGDSTLTNEPSEQFANKFMQMTPFTRWRLRLSASAKENAGLAFPTATALDSTTQIVITFHVTAIRQIDWRHDEE

SEQ ID NO: 283 - protein, 867 aa, synthetic construct
  REGION 1..867: note = Synthetic
MALVDYGKLFEDLNQISMGVLDRVEFSEVMVIHRMYVRLADLNVGQLEGAEKVRHLYIFADVVELPVVEWRWPPQIPGSVTVIILCRLLQWPTDGRQSDTELHLTFMKLHAIQREENRWEITAADGMNWGVYIHAEEVQVGVLTMSWSSVLRVSALRSVITSGFRAVSVFEVPGSVRSTLGATLRPDHALYSTTMQATPNASHISAFNLRIVSPSAYRVCPLQNDTDTYLGIPADVAAVLPVDVVTDPNILLGMQTTVHIAELVKACHPSPDVVSAVGEHLNWLNKLLLPLKESTQLQGSESYKECLALLGRVHAAMKMVRIGLVVPQLQYRMYGSLINQMAQVAQNYDREFKQFKLFIIQNQILGSYLLQQNRAFAERELQMESFHAAVISQRREELDNTFAKMDRLSGQMEAESSAMEQAKKEMDEGLRQFQNRQVANALFAVLSAVAQIGLAFLTAGATAPGAVASAGQAVSIAGQAAQGLRRVVEILEQLEAVMEVVAAVKDLVDSLEQVGQIVDAPVMPELPSEADWSIFVNEVEAVAEGMPTEVSEVPVWRAKCKNVAALGREMSITAVQMSELQYDIWVQGMMRDMARSQADRLAAIQPADLTNYLEMATQMDMRTTRMLLGLLNILRIQNAALRYEYLLMPTELTTWPLGMDTVGDLLIAQENAALIGLMQLGPSSDFTSRHVVKDIPVNLLLDGEDWEFEIPVQAGMSSFPSSWSRVRIRHLEMHFVKEASGIGGEIIHQPTTQTGTVYILLQGSTIFHDRRRDQVLPFQAAAPLNYHYAYRLDTGDSTLTNEPSEQFANKFMQMTPFTRWRLRLSASAKENAGLAFPTATALDSTTQIVITFHVTAIRQIDWRHDEE

SEQ ID NO: 284 - protein, 867 aa, synthetic construct
  REGION 1..867: note = Synthetic
MALVDYGKLFEDLNQISMGVLDRVEFSEVMVIHRMYVRLADLNVGQLEGAEKVRHLYIFCDVIELPVVEWRWPPQIPGSVTVIILCRLLQWPTDGRQSDTELHLTFMKLHAIQREENRWEITAADGMNWGVYIHAEEVQVGVLTMSWSSVLRVSALRSVITSGFRAVSVFEVPGSVRSTLGATLRPDHALYSTTMQATPNASHISAFNLRIVSPSAYRVCPLQNDTDTYLGIPADVAAVLPVDVVTDPNILLGMQTTVHIAELVKACHPSPDVVSAVGEHLNWLNKLLLPLKESTQLQGSESYKECLALLGRVHAAMKMVRIGLVVPQLQYRMYGSLINQMAQVAQNYDREFKQFKLFIIQNQILGSYLLQQNRAFAERELQMESFHAAVISQRREELDNTFAKMDRLSGQMEAESSAMEQAKKEMDEGLRQFQNRQVANALFAVLSAVAQIGLAFLTAGATAPGAVASAGQAVSIAGQAAQGLRRVVEILEQLEAVMEVVAAVKDLVDSLEQVGQIVDAPVMPELPSEADWSIFVNEVEAVAEGMPTEVSEVPVWRAKCKNVAALGREMSITAVQMSELQYDIWVQGMMRDMARSQADRLAAIQPADLTNYLEMATQMDMRTTRMLLGLLNILRIQNAALRYEYLLMPTELTTWPLGMDTVGDLLIAQENAALIGLMQLGPSSDFTSRHVVKDIPVNLLLDGEDWEFEIPVQAGMSSFPSSWSRVRIRHLEMHFVKEASGIGGEIIHQPTTQTGTVYILLQGSTIFHDRRRDQVLPFQAAAPLNYHYAYRLDTGDSTLTNEPSEQFANKFMQMTPFTRWRLRLSASAKENAGLAFPTATALDSTTQIVITFHVTAIRQIDWRHDEE

SEQ ID NO: 285 - protein, 867 aa, synthetic construct
  REGION 1..867: note = Synthetic
MALVDYGKLFEDLNQISMGVLDRVEFSEVMVIHRMYVRLADLNVGQLEGAEKVRHLYIFSDVIELPVVEWRWPPQIPGSVTVIILCRLLQWPTDGRQSDTELHLTFMKLHAIQREENRWEITAADGMNWGVYIHAEEVQVGVLTMSWSSVLRVSALRSVITSGFRAVSVFEVPGSVRSTLGATLRPDHALYSTTMQATPNASHISAFNLRIVSPSAYRVCPLQNDTDTYLGIPADVAAVLPVDVVTDPNILLGMQTTVHIAELVKACHPSPDVVSAVGEHLNWLNKLLLPLKESTQLQGSESYKECLALLGRVHAAMKMVRIGLVVPQLQYRMYGSLINQMAQVAQNYDREFKQFKLFIIQNQILGSYLLQQNRAFAERELQMESFHAAVISQRREELDNTFAKMDRLSGQMEAESSAMEQAKKEMDEGLRQFQNRQVANALFAVLSAVAQIGLAFLTAGATAPGAVASAGQAVSIAGQAAQGLRRVVEILEQLEAVMEVVAAVKDLVDSLEQVGQIVDAPVMPELPSEADWSIFVNEVEAVAEGMPTEVSEVPVWRAKCKNVAALGREMSITAVQMSELQYDIWVQGMMRDMARSQADRLAAIQPADLTNYLEMATQMDMRTTRMLLGLLNILRIQNAALRYEYLLMPTELTTWPLGMDTVGDLLIAQENAALIGLMQLGPSSDFTSRHVVKDIPVNLLLDGEDWEFEIPVQAGMSSFPSSWSRVRIRHLEMHFVKEASGIGGEIIHQPTTQTGTVYILLQGSTIFHDRRRDQVLPFQAAAPLNYHYAYRLDTGDSTLTNEPSEQFANKFMQMTPFTRWRLRLSASAKENAGLAFPTATALDSTTQIVITFHVTAIRQIDWRHDEE

SEQ ID NO: 286 - protein, 867 aa, synthetic construct
  REGION 1..867: note = Synthetic
MALVDYGKLFEDLNQISMGVLDRVEFSEVMVIHRMYVRLADLNVGQLEGAEKVRHLYIFSDVVELPVVEWRWPPQIPGSVTVIILCRLLQWPTDGRQSDTELHLTFMKLHAIQREENRWEITAADGMNWGVYIHAEEVQVGVLTMSWSSVLRVSALRSVITSGFRAVSVFEVPGSVRSTLGATLRPDHALYSTTMQATPNASHISAFNLRIVSPSAYRVCPLQNDTDTYLGIPADVAAVLPVDVVTDPNILLGMQTTVHIAELVKACHPSPDVVSAVGEHLNWLNKLLLPLKESTQLQGSESYKECLALLGRVHAAMKMVRIGLVVPQLQYRMYGSLINQMAQVAQNYDREFKQFKLFIIQNQILGSYLLQQNRAFAERELQMESFHAAVISQRREELDNTFAKMDRLSGQMEAESSAMEQAKKEMDEGLRQFQNRQVANALFAVLSAVAQIGLAFLTAGATAPGAVASAGQAVSIAGQAAQGLRRVVEILEQLEAVMEVVAAVKDLVDSLEQVGQIVDAPVMPELPSEADWSIFVNEVEAVAEGMPTEVSEVPVWRAKCKNVAALGREMSITAVQMSELQYDIWVQGMMRDMARSQADRLAAIQPADLTNYLEMATQMDMRTTRMLLGLLNILRIQNAALRYEYLLMPTELTTWPLGMDTVGDLLIAQENAALIGLMQLGPSSDFTSRHVVKDIPVNLLLDGEDWEFEIPVQAGMSSFPSSWSRVRIRHLEMHFVKEASGIGGEIIHQPTTQTGTVYILLQGSTIFHDRRRDQVLPFQAAAPLNYHYAYRLDTGDSTLTNEPSEQFANKFMQMTPFTRWRLRLSASAKENAGLAFPTATALDSTTQIVITFHVTAIRQIDWRHDEE

SEQ ID NO: 287 - protein, 867 aa, synthetic construct
  REGION 1..867: note = Synthetic
MALVDYGKLFEDLNQISMGVLDRVEFSEVMVIHRMYVRLADLNVGQLEGAEKVRHLYVFTDVLELPVVEWRWPPQIPGSVTVIILCRLLQWPTDGRQSDTELHLTFMKLHAIQREENRWEITAADGMNWGVYIHAEEVQVGVLTMSWSSVLRVSALRSVITSGFRAVSVFEVPGSVRSTLGATLRPDHALYSTTMQATPNASHISAFNLRIVSPSAYRVCPLQNDTDTYLGIPADVAAVLPVDVVTDPNILLGMQTTVHIAELVKACHPSPDVVSAVGEHLNWLNKLLLPLKESTQLQGSESYKECLALLGRVHAAMKMVRIGLVVPQLQYRMYGSLINQMAQVAQNYDREFKQFKLFIIQNQILGSYLLQQNRAFAERELQMESFHAAVISQRREELDNTFAKMDRLSGQMEAESSAMEQAKKEMDEGLRQFQNRQVANALFAVLSAVAQIGLAFLTAGATAPGAVASAGQAVSIAGQAAQGLRRVVEILEQLEAVMEVVAAVKDLVDSLEQVGQIVDAPVMPELPSEADWSIFVNEVEAVAEGMPTEVSEVPVWRAKCKNVAALGREMSITAVQMSELQYDIWVQGMMRDMARSQADRLAAIQPADLTNYLEMATQMDMRTTRMLLGLLNILRIQNAALRYEYLLMPTELTTWPLGMDTVGDLLIAQENAALIGLMQLGPSSDFTSRHVVKDIPVNLLLDGEDWEFEIPVQAGMSSFPSSWSRVRIRHLEMHFVKEASGIGGEIIHQPTTQTGTVYILLQGSTIFHDRRRDQVLPFQAAAPLNYHYAYRLDTGDSTLTNEPSEQFANKFMQMTPFTRWRLRLSASAKENAGLAFPTATALDSTTQIVITFHVTAIRQIDWRHDEE

SEQ ID NO: 288 - protein, 867 aa, synthetic construct
  REGION 1..867: note = Synthetic
MALVDYGKLFEDLNQISMGVLDRVEFSEVMVIHRMYVRLADLNVGQLEGAEKVRQLYIFCDVIVLPVVEWRWPPQIPGSVTVIILCRLLQWPTDGRQSDTELHLTFMKLHAIQREENRWEITAADGMNWGVYIHAEEVQVGVLTMSWSSVLRVSALRSVITSGFRAVSVFEVPGSVRSTLGATLRPDHALYSTTMQATPNASHISAFNLRIVSPSAYRVCPLQNDTDTYLGIPADVAAVLPVDVVTDPNILLGMQTTVHIAELVKACHPSPDVVSAVGEHLNWLNKLLLPLKESTQLQGSESYKECLALLGRVHAAMKMVRIGLVVPQLQYRMYGSLINQMAQVAQNYDREFKQFKLFIIQNQILGSYLLQQNRAFAERELQMESFHAAVISQRREELDNTFAKMDRLSGQMEAESSAMEQAKKEMDEGLRQFQNRQVANALFAVLSAVAQIGLAFLTAGATAPGAVASAGQAVSIAGQAAQGLRRVVEILEQLEAVMEVVAAVKDLVDSLEQVGQIVDAPVMPELPSEADWSIFVNEVEAVAEGMPTEVSEVPVWRAKCKNVAALGREMSITAVQMSELQYDIWVQGMMRDMARSQADRLAAIQPADLTNYLEMATQMDMRTTRMLLGLLNILRIQNAALRYEYLLMPTELTTWPLGMDTVGDLLIAQENAALIGLMQLGPSSDFTSRHVVKDIPVNLLLDGEDWEFEIPVQAGMSSFPSSWSRVRIRHLEMHFVKEASGIGGEIIHQPTTQTGTVYILLQGSTIFHDRRRDQVLPFQAAAPLNYHYAYRLDTGDSTLTNEPSEQFANKFMQMTPFTRWRLRLSASAKENAGLAFPTATALDSTTQIVITFHVTAIRQIDWRHDEE

SEQ ID NO: 289 - protein, 867 aa, synthetic construct
  REGION 1..867: note = Synthetic
MALVDYGKLFEDLNQISMGVLDRVEFSEVMVIHRMYVRLADLNVGQLEGAEKVRQLYIFSDVVVLPVVEWRWPPQIPGSVTVIILCRLLQWPTDGRQSDTELHLTFMKLHAIQREENRWEITAADGMNWGVYIHAEEVQVGVLTMSWSSVLRVSALRSVITSGFRAVSVFEVPGSVRSTLGATLRPDHALYSTTMQATPNASHISAFNLRIVSPSAYRVCPLQNDTDTYLGIPADVAAVLPVDVVTDPNILLGMQTTVHIAELVKACHPSPDVVSAVGEHLNWLNKLLLPLKESTQLQGSESYKECLALLGRVHAAMKMVRIGLVVPQLQYRMYGSLINQMAQVAQNYDREFKQFKLFIIQNQILGSYLLQQNRAFAERELQMESFHAAVISQRREELDNTFAKMDRLSGQMEAESSAMEQAKKEMDEGLRQFQNRQVANALFAVLSAVAQIGLAFLTAGATAPGAVASAGQAVSIAGQAAQGLRRVVEILEQLEAVMEVVAAVKDLVDSLEQVGQIVDAPVMPELPSEADWSIFVNEVEAVAEGMPTEVSEVPVWRAKCKNVAALGREMSITAVQMSELQYDIWVQGMMRDMARSQADRLAAIQPADLTNYLEMATQMDMRTTRMLLGLLNILRIQNAALRYEYLLMPTELTTWPLGMDTVGDLLIAQENAALIGLMQLGPSSDFTSRHVVKDIPVNLLLDGEDWEFEIPVQAGMSSFPSSWSRVRIRHLEMHFVKEASGIGGEIIHQPTTQTGTVYILLQGSTIFHDRRRDQVLPFQAAAPLNYHYAYRLDTGDSTLTNEPSEQFANKFMQMTPFTRWRLRLSASAKENAGLAFPTATALDSTTQIVITFHVTAIRQIDWRHDEE

SEQ ID NO: 290 - protein, 867 aa, synthetic construct
  REGION 1..867: note = Synthetic
MALVDYGKLFEDLNQISMGVLDRVEFSEVMVIHRMYVRLADLNVGQLEGAEKVRQLYVFCDVLVLPVVEWRWPPQIPGSVTVIILCRLLQWPTDGRQSDTELHLTFMKLHAIQREENRWEITAADGMNWGVYIHAEEVQVGVLTMSWSSVLRVSALRSVITSGFRAVSVFEVPGSVRSTLGATLRPDHALYSTTMQATPNASHISAFNLRIVSPSAYRVCPLQNDTDTYLGIPADVAAVLPVDVVTDPNILLGMQTTVHIAELVKACHPSPDVVSAVGEHLNWLNKLLLPLKESTQLQGSESYKECLALLGRVHAAMKMVRIGLVVPQLQYRMYGSLINQMAQVAQNYDREFKQFKLFIIQNQILGSYLLQQNRAFAERELQMESFHAAVISQRREELDNTFAKMDRLSGQMEAESSAMEQAKKEMDEGLRQFQNRQVANALFAVLSAVAQIGLAFLTAGATAPGAVASAGQAVSIAGQAAQGLRRVVEILEQLEAVMEVVAAVKDLVDSLEQVGQIVDAPVMPELPSEADWSIFVNEVEAVAEGMPTEVSEVPVWRAKCKNVAALGREMSITAVQMSELQYDIWVQGMMRDMARSQADRLAAIQPADLTNYLEMATQMDMRTTRMLLGLLNILRIQNAALRYEYLLMPTELTTWPLGMDTVGDLLIAQENAALIGLMQLGPSSDFTSRHVVKDIPVNLLLDGEDWEFEIPVQAGMSSFPSSWSRVRIRHLEMHFVKEASGIGGEIIHQPTTQTGTVYILLQGSTIFHDRRRDQVLPFQAAAPLNYHYAYRLDTGDSTLTNEPSEQFANKFMQMTPFTRWRLRLSASAKENAGLAFPTATALDSTTQIVITFHVTAIRQIDWRHDEE

SEQ ID NO: 291 - protein, 867 aa, synthetic construct
  REGION 1..867: note = Synthetic
MALVDYGKLFEDLNQISMGVLDRVEFSEVMVIHRMYVRLADLNVGQLEGAEKVRRLYIFADILELPVVEWRWPPQIPGSVTVIILCRLLQWPTDGRQSDTELHLTFMKLHAIQREENRWEITAADGMNWGVYIHAEEVQVGVLTMSWSSVLRVSALRSVITSGFRAVSVFEVPGSVRSTLGATLRPDHALYSTTMQATPNASHISAFNLRIVSPSAYRVCPLQNDTDTYLGIPADVAAVLPVDVVTDPNILLGMQTTVHIAELVKACHPSPDVVSAVGEHLNWLNKLLLPLKESTQLQGSESYKECLALLGRVHAAMKMVRIGLVVPQLQYRMYGSLINQMAQVAQNYDREFKQFKLFIIQNQILGSYLLQQNRAFAERELQMESFHAAVISQRREELDNTFAKMDRLSGQMEAESSAMEQAKKEMDEGLRQFQNRQVANALFAVLSAVAQIGLAFLTAGATAPGAVASAGQAVSIAGQAAQGLRRVVEILEQLEAVMEVVAAVKDLVDSLEQVGQIVDAPVMPELPSEADWSIFVNEVEAVAEGMPTEVSEVPVWRAKCKNVAALGREMSITAVQMSELQYDIWVQGMMRDMARSQADRLAAIQPADLTNYLEMATQMDMRTTRMLLGLLNILRIQNAALRYEYLLMPTELTTWPLGMDTVGDLLIAQENAALIGLMQLGPSSDFTSRHVVKDIPVNLLLDGEDWEFEIPVQAGMSSFPSSWSRVRIRHLEMHFVKEASGIGGEIIHQPTTQTGTVYILLQGSTIFHDRRRDQVLPFQAAAPLNYHYAYRLDTGDSTLTNEPSEQFANKFMQMTPFTRWRLRLSASAKENAGLAFPTATALDSTTQIVITFHVTAIRQIDWRHDEE

SEQ ID NO: 292 - protein, 867 aa, synthetic construct
  REGION 1..867: note = Synthetic
MALVDYGKLFEDLNQISMGVLDRVEFSEVMVIHRMYVRLADLNVGQLEGAEKVRRLYIFADIVELPVVEWRWPAQIPGSVTVIILCRLLQWPTDGRQSDTELHLTFMKLHAIQREENRWEITAADGMNWGVYIHAEEVQVGVLTMSWSSVLRVSALRSVITSGFRAVSVFEVPGSVRSTLGATLRPDHALYSTTMQATPNASHISAFNLRIVSPSAYRVCPLQNDTDTYLGIPADVAAVLPVDVVTDPNILLGMQTTVHIAELVKACHPSPDVVSAVGEHLNWLNKLLLPLKESTQLQGSESYKECLALLGRVHAAMKMVRIGLVVPQLQYRMYGSLINQMAQVAQNYDREFKQFKLFIIQNQILGSYLLQQNRAFAERELQMESFHAAVISQRREELDNTFAKMDRLSGQMEAESSAMEQAKKEMDEGLRQFQNRQVANALFAVLSAVAQIGLAFLTAGATAPGAVASAGQAVSIAGQAAQGLRRVVEILEQLEAVMEVVAAVKDLVDSLEQVGQIVDAPVMPELPSEADWSIFVNEVEAVAEGMPTEVSEVPVWRAKCKNVAALGREMSITAVQMSELQYDIWVQGMMRDMARSQADRLAAIQPADLTNYLEMATQMDMRTTRMLLGLLNILRIQNAALRYEYLLMPTELTTWPLGMDTVGDLLIAQENAALIGLMQLGPSSDFTSRHVVKDIPVNLLLDGEDWEFEIPVQAGMSSFPSSWSRVRIRHLEMHFVKEASGIGGEIIHQPTTQTGTVYILLQGSTIFHDRRRDQVLPFQAAAPLNYHYAYRLDTGDSTLTNEPSEQFANKFMQMTPFTRWRLRLSASAKENAGLAFPTATALDSTTQIVITFHVTAIRQIDWRHDEE

SEQ ID NO: 293 - protein, 867 aa, synthetic construct
  REGION 1..867: note = Synthetic
MALVDYGKLFEDLNQISMGVLDRVEFSEVMVIHRMYVRLADLNVGQLEGAEKVRRLYIFGDIVELPVVEWRWPPQIPGSVTVIILCRLLQWPTDGRQSDTELHLTFMKLHAIQREENRWEITAADGMNWGVYIHAEEVQVGVLTMSWSSVLRVSALRSVITSGFRAVSVFEVPGSVRSTLGATLRPDHALYSTTMQATPNASHISAFNLRIVSPSAYRVCPLQNDTDTYLGIPADVAAVLPVDVVTDPNILLGMQTTVHIAELVKACHPSPDVVSAVGEHLNWLNKLLLPLKESTQLQGSESYKECLALLGRVHAAMKMVRIGLVVPQLQYRMYGSLINQMAQVAQNYDREFKQFKLFIIQNQILGSYLLQQNRAFAERELQMESFHAAVISQRREELDNTFAKMDRLSGQMEAESSAMEQAKKEMDEGLRQFQNRQVANALFAVLSAVAQIGLAFLTAGATAPGAVASAGQAVSIAGQAAQGLRRVVEILEQLEAVMEVVAAVKDLVDSLEQVGQIVDAPVMPELPSEADWSIFVNEVEAVAEGMPTEVSEVPVWRAKCKNVAALGREMSITAVQMSELQYDIWVQGMMRDMARSQADRLAAIQPADLTNYLEMATQMDMRTTRMLLGLLNILRIQNAALRYEYLLMPTELTTWPLGMDTVGDLLIAQENAALIGLMQLGPSSDFTSRHVVKDIPVNLLLDGEDWEFEIPVQAGMSSFPSSWSRVRIRHLEMHFVKEASGIGGEIIHQPTTQTGTVYILLQGSTIFHDRRRDQVLPFQAAAPLNYHYAYRLDTGDSTLTNEPSEQFANKFMQMTPFTRWRLRLSASAKENAGLAFPTATALDSTTQIVITFHVTAIRQIDWRHDEE

SEQ ID NO: 294 - protein, 867 aa, synthetic construct
  REGION 1..867: note = Synthetic
MALVDYGKLFEDLNQISMGVLDRVEFSEVMVIHRMYVRLADLNVGQLEGAEKVRRLYIFTDIIELPVVEWRWPPQIPGSVTVIILCRLLQWPTDGRQSDTELHLTFMKLHAIQREENRWEITAADGMNWGVYIHAEEVQVGVLTMSWSSVLRVSALRSVITSGFRAVSVFEVPGSVRSTLGATLRPDHALYSTTMQATPNASHISAFNLRIVSPSAYRVCPLQNDTDTYLGIPADVAAVLPVDVVTDPNILLGMQTTVHIAELVKACHPSPDVVSAVGEHLNWLNKLLLPLKESTQLQGSESYKECLALLGRVHAAMKMVRIGLVVPQLQYRMYGSLINQMAQVAQNYDREFKQFKLFIIQNQILGSYLLQQNRAFAERELQMESFHAAVISQRREELDNTFAKMDRLSGQMEAESSAMEQAKKEMDEGLRQFQNRQVANALFAVLSAVAQIGLAFLTAGATAPGAVASAGQAVSIAGQAAQGLRRVVEILEQLEAVMEVVAAVKDLVDSLEQVGQIVDAPVMPELPSEADWSIFVNEVEAVAEGMPTEVSEVPVWRAKCKNVAALGREMSITAVQMSELQYDIWVQGMMRDMARSQADRLAAIQPADLTNYLEMATQMDMRTTRMLLGLLNILRIQNAALRYEYLLMPTELTTWPLGMDTVGDLLIAQENAALIGLMQLGPSSDFTSRHVVKDIPVNLLLDGEDWEFEIPVQAGMSSFPSSWSRVRIRHLEMHFVKEASGIGGEIIHQPTTQTGTVYILLQGSTIFHDRRRDQVLPFQAAAPLNYHYAYRLDTGDSTLTNEPSEQFANKFMQMTPFTRWRLRLSASAKENAGLAFPTATALDSTTQIVITFHVTAIRQIDWRHDEE

SEQ ID NO: 295 - protein, 867 aa, synthetic construct
  REGION 1..867: note = Synthetic
MALVDYGKLFEDLNQISMGVLDRVEFSEVMVIHRMYVRLADLNVGQLEGAEKVRRLYVFADIIDLPVVEWRWPPQIPGSVTVIILCRLLQWPTDGRQSDTELHLTFMKLHAIQREENRWEITAADGMNWGVYIHAEEVQVGVLTMSWSSVLRVSALRSVITSGFRAVSVFEVPGSVRSTLGATLRPDHALYSTTMQATPNASHISAFNLRIVSPSAYRVCPLQNDTDTYLGIPADVAAVLPVDVVTDPNILLGMQTTVHIAELVKACHPSPDVVSAVGEHLNWLNKLLLPLKESTQLQGSESYKECLALLGRVHAAMKMVRIGLVVPQLQYRMYGSLINQMAQVAQNYDREFKQFKLFIIQNQILGSYLLQQNRAFAERELQMESFHAAVISQRREELDNTFAKMDRLSGQMEAESSAMEQAKKEMDEGLRQFQNRQVANALFAVLSAVAQIGLAFLTAGATAPGAVASAGQAVSIAGQAAQGLRRVVEILEQLEAVMEVVAAVKDLVDSLEQVGQIVDAPVMPELPSEADWSIFVNEVEAVAEGMPTEVSEVPVWRAKCKNVAALGREMSITAVQMSELQYDIWVQGMMRDMARSQADRLAAIQPADLTNYLEMATQMDMRTTRMLLGLLNILRIQNAALRYEYLLMPTELTTWPLGMDTVGDLLIAQENAALIGLMQLGPSSDFTSRHVVKDIPVNLLLDGEDWEFEIPVQAGMSSFPSSWSRVRIRHLEMHFVKEASGIGGEIIHQPTTQTGTVYILLQGSTIFHDRRRDQVLPFQAAAPLNYHYAYRLDTGDSTLTNEPSEQFANKFMQMTPFTRWRLRLSASAKENAGLAFPTATALDSTTQIVITFHVTAIRQIDWRHDEE

SEQ ID NO: 296 - protein, 867 aa, synthetic construct
  REGION 1..867: note = Synthetic
MALVDYGKLFEDLNQISMGVLDRVEFSEVMVIHRMYVRLADLNVGQLEGAEKVRRLYVFADIVVLPVVEWRWPPQIPGSVTVIILCRLLQWPTDGRQSDTELHLTFMKLHAIQREENRWEITAADGMNWGVYIHAEEVQVGVLTMSWSSVLRVSALRSVITSGFRAVSVFEVPGSVRSTLGATLRPDHALYSTTMQATPNASHISAFNLRIVSPSAYRVCPLQNDTDTYLGIPADVAAVLPVDVVTDPNILLGMQTTVHIAELVKACHPSPDVVSAVGEHLNWLNKLLLPLKESTQLQGSESYKECLALLGRVHAAMKMVRIGLVVPQLQYRMYGSLINQMAQVAQNYDREFKQFKLFIIQNQILGSYLLQQNRAFAERELQMESFHAAVISQRREELDNTFAKMDRLSGQMEAESSAMEQAKKEMDEGLRQFQNRQVANALFAVLSAVAQIGLAFLTAGATAPGAVASAGQAVSIAGQAAQGLRRVVEILEQLEAVMEVVAAVKDLVDSLEQVGQIVDAPVMPELPSEADWSIFVNEVEAVAEGMPTEVSEVPVWRAKCKNVAALGREMSITAVQMSELQYDIWVQGMMRDMARSQADRLAAIQPADLTNYLEMATQMDMRTTRMLLGLLNILRIQNAALRYEYLLMPTELTTWPLGMDTVGDLLIAQENAALIGLMQLGPSSDFTSRHVVKDIPVNLLLDGEDWEFEIPVQAGMSSFPSSWSRVRIRHLEMHFVKEASGIGGEIIHQPTTQTGTVYILLQGSTIFHDRRRDQVLPFQAAAPLNYHYAYRLDTGDSTLTNEPSEQFANKFMQMTPFTRWRLRLSASAKENAGLAFPTATALDSTTQIVITFHVTAIRQIDWRHDEE

SEQ ID NO: 297 - protein, 867 aa, synthetic construct
  REGION 1..867: note = Synthetic
MALVDYGKLFEDLNQISMGVLDRVEFSEVMVIHRMYVRLADLNVGQLEGAEKVRRLYVFCDVVVLPVVEWRWPPQIPGSVTVIILCRLLQWPTDGRQSDTELHLTFMKLHAIQREENRWEITAADGMNWGVYIHAEEVQVGVLTMSWSSVLRVSALRSVITSGFRAVSVFEVPGSVRSTLGATLRPDHALYSTTMQATPNASHISAFNLRIVSPSAYRVCPLQNDTDTYLGIPADVAAVLPVDVVTDPNILLGMQTTVHIAELVKACHPSPDVVSAVGEHLNWLNKLLLPLKESTQLQGSESYKECLALLGRVHAAMKMVRIGLVVPQLQYRMYGSLINQMAQVAQNYDREFKQFKLFIIQNQILGSYLLQQNRAFAERELQMESFHAAVISQRREELDNTFAKMDRLSGQMEAESSAMEQAKKEMDEGLRQFQNRQVANALFAVLSAVAQIGLAFLTAGATAPGAVASAGQAVSIAGQAAQGLRRVVEILEQLEAVMEVVAAVKDLVDSLEQVGQIVDAPVMPELPSEADWSIFVNEVEAVAEGMPTEVSEVPVWRAKCKNVAALGREMSITAVQMSELQYDIWVQGMMRDMARSQADRLAAIQPADLTNYLEMATQMDMRTTRMLLGLLNILRIQNAALRYEYLLMPTELTTWPLGMDTVGDLLIAQENAALIGLMQLGPSSDFTSRHVVKDIPVNLLLDGEDWEFEIPVQAGMSSFPSSWSRVRIRHLEMHFVKEASGIGGEIIHQPTTQTGTVYILLQGSTIFHDRRRDQVLPFQAAAPLNYHYAYRLDTGDSTLTNEPSEQFANKFMQMTPFTRWRLRLSASAKENAGLAFPTATALDSTTQIVITFHVTAIRQIDWRHDEE

SEQ ID NO: 298 - protein, 867 aa, synthetic construct
  REGION 1..867: note = Synthetic
MALVDYGKLFEDLNQISMGVLDRVEFSEVMVIHRMYVRLADLNVGQLEGAEKVRRLYVFTDIIELPVVEWRWPPQIPGSVTVIILCRLLQWPTDGRQSDTELHLTFMKLHAIQREENRWEITAADGMNWGVYIHAEEVQVGVLTMSWSSVLRVSALRSVITSGFRAVSVFEVPGSVRSTLGATLRPDHALYSTTMQATPNASHISAFNLRIVSPSAYRVCPLQNDTDTYLGIPADVAAVLPVDVVTDPNILLGMQTTVHIAELVKACHPSPDVVSAVGEHLNWLNKLLLPLKESTQLQGSESYKECLALLGRVHAAMKMVRIGLVVPQLQYRMYGSLINQMAQVAQNYDREFKQFKLFIIQNQILGSYLLQQNRAFAERELQMESFHAAVISQRREELDNTFAKMDRLSGQMEAESSAMEQAKKEMDEGLRQFQNRQVANALFAVLSAVAQIGLAFLTAGATAPGAVASAGQAVSIAGQAAQGLRRVVEILEQLEAVMEVVAAVKDLVDSLEQVGQIVDAPVMPELPSEADWSIFVNEVEAVAEGMPTEVSEVPVWRAKCKNVAALGREMSITAVQMSELQYDIWVQGMMRDMARSQADRLAAIQPADLTNYLEMATQMDMRTTRMLLGLLNILRIQNAALRYEYLLMPTELTTWPLGMDTVGDLLIAQENAALIGLMQLGPSSDFTSRHVVKDIPVNLLLDGEDWEFEIPVQAGMSSFPSSWSRVRIRHLEMHFVKEASGIGGEIIHQPTTQTGTVYILLQGSTIFHDRRRDQVLPFQAAAPLNYHYAYRLDTGDSTLTNEPSEQFANKFMQMTPFTRWRLRLSASAKENAGLAFPTATALDSTTQIVITFHVTAIRQIDWRHDEE

SEQ ID NO: 299 - protein, 867 aa, synthetic construct
  REGION 1..867: note = Synthetic
MALVDYGKLFEDLNQISMGVLDRVEFSEVMVIHRMYVRLADLNVGQLEGAEKVRRLYVFTDVLVLPVVEWRWPPQIPGSVTVIILCRLLQWPTDGRQSDTELHLTFMKLHAIQREENRWEITAADGMNWGVYIHAEEVQVGVLTMSWSSVLRVSALRSVITSGFRAVSVFEVPGSVRSTLGATLRPDHALYSTTMQATPNASHISAFNLRIVSPSAYRVCPLQNDTDTYLGIPADVAAVLPVDVVTDPNILLGMQTTVHIAELVKACHPSPDVVSAVGEHLNWLNKLLLPLKESTQLQGSESYKECLALLGRVHAAMKMVRIGLVVPQLQYRMYGSLINQMAQVAQNYDREFKQFKLFIIQNQILGSYLLQQNRAFAERELQMESFHAAVISQRREELDNTFAKMDRLSGQMEAESSAMEQAKKEMDEGLRQFQNRQVANALFAVLSAVAQIGLAFLTAGATAPGAVASAGQAVSIAGQAAQGLRRVVEILEQLEAVMEVVAAVKDLVDSLEQVGQIVDAPVMPELPSEADWSIFVNEVEAVAEGMPTEVSEVPVWRAKCKNVAALGREMSITAVQMSELQYDIWVQGMMRDMARSQADRLAAIQPADLTNYLEMATQMDMRTTRMLLGLLNILRIQNAALRYEYLLMPTELTTWPLGMDTVGDLLIAQENAALIGLMQLGPSSDFTSRHVVKDIPVNLLLDGEDWEFEIPVQAGMSSFPSSWSRVRIRHLEMHFVKEASGIGGEIIHQPTTQTGTVYILLQGSTIFHDRRRDQVLPFQAAAPLNYHYAYRLDTGDSTLTNEPSEQFANKFMQMTPFTRWRLRLSASAKENAGLAFPTATALDSTTQIVITFHVTAIRQIDWRHDEE

SEQ ID NO: 300 - DNA, 2601 bp, synthetic construct
  misc_feature 1..2601: note = Synthetic
  source 1..2601: mol_type = other DNA
atggctctcgtggattacggcaagcttttcgaggatctgaaccagataagcatgggtgtactggatcgggtagagttttcagaggtgatggtgatccacaggatgtatgtgaggctagctgatctgaatgtggggcagctcgagggagccgagaaagtgaagcggttgtatgtgtttgcggacgtggtggagctaccagtcgtggaatggcggtggccgccgcaaataccaggatcggtgacggtgatcatattgtgtcgtcttcttcaatggccaactgatgggaggcagtcggacaccgagctccacctgacattcatgaagttgcatgccatacaacgagaggaaaatcggtgggagataaccgcagcagatggcatgaactggggagtttacatacacgcagaggaagtacaggttggcgtgctgacaatgtcatggtcttcggtacttagagtttcggcacttcgctctgttataacctccggctttcgcgccgttagtgtgtttgaggtaccgggaagtgtaaggtccacccttggagctactttaaggcccgatcacgccttatatagtacaactatgcaagccacacccaacgcatcgcatattagtgcttttaaccttcgcatagtttccccgtcggcatatcgtgtttgtcctctccaaaatgacacagatacctacttaggtattccagcagacgtggcggcagttcttccagtagacgtggtgactgatcctaacatcttgctgggcatgcagacaacggtacacattgcggagctagtcaaggcatgtcatccgtcacccgatgttgtgagcgctgtaggggagcacctgaactggctcaacaaactcttactcccacttaaggaatcgactcagttgcaaggaagcgagtcgtacaaggagtgccttgcactcttgggtcgtgttcacgctgcgatgaagatggtgagaattggcttagtagtgccccagctgcaatacagaatgtacggtagcctcatcaaccaaatggcccaagtagcacaaaactacgaccgagaattcaagcaattcaaattattcatcatccaaaatcaaatccttggcagctatttgctgcagcagaacagggcatttgctgagagggagctgcagatggagagctttcatgctgctgtcatttctcaaagaagggaggagttggacaatacattcgcaaagatggaccgattgagcgggcaaatggaggcagagagtagtgcaatggagcaagccaaaaaggaaatggacgaaggattgaggcagttccagaataggcaagttgcgaacgccctctttgccgttcttagcgctgtagctcagattgggcttgcattccttacggctggtgcaacggctcctggagctgtggcgtcggcggggcaagctgtgagcatagcaggtcaggcggcgcaaggtctgcgaagggtggtggaaattctagagcagctggaggctgtgatggaggttgtggctgctgtgaaggacctcgtggattcattggaacaggtaggtcagattgtggacgcaccggtgatgccggaattgccctcagaggcggactggtccatttttgtgaacgaggtggaggccgtggcagagggcatgccaacggaagtctcggaggttccggtgtggcacgcccggtgcaagtccgtggctgcactgggtcgggagatgagcatcacggcagtacagatgtcggagctgcagtatgacatctgggtgcaaggcatgatgcgggatatggctcgaagccaggcagacaggctggccgcaattcaacccgcggaccttaccaactatttggagatggctacccagatggatatgcggactacgaggatgctgctggggctcctcaacatattgcgcatccagaatgcggcgctcaggtacgagtatcttctaatgcccacggagctcacaacatggccactgggtatggataccgtgggtgacttgctcatcgcgcaggagaatgctgcactgataggattaatgcagctagggccctcatctgatttcacgagcaggcatgtggtgaaagacatacctgtgaacttgctgctcgatggcgaggattgggagtttgagattcctgtgcaagctggcatgtccagcttcccttccagctggtctcgcgtccgtattcggcacctggagatgcactttgtgaaggaggccagcggtattggtggtgagattatccaccagcctaccacccagactgggaccgtttacatccttctgcagggttccactatcttccatgaccgcagaagagaccaggtgttgccttttcaggccgctgctccgctcaactaccattacgcgtaccgcctcgacaccggcgactccactctcacaaacgaaccctctgaacagtttgccaacaagttcatgcagatgacacccttcacccgttggaggcttcgtctgtctgcgtccgcaaaagagaatgcaggattagcctttcccacggctacagcacttgactccactacccagattgtcatcactttccatgttacggccatcagacaaattgactggcggcacgacgaagag

SEQ ID NO: 301 - DNA, 2601 bp, synthetic construct
  misc_feature 1..2601: note = Synthetic
  source 1..2601: mol_type = other DNA
atggctctcgtggattacggcaagcttttcgaggatctgaaccagataagcatgggtgtactggatcgggtagagttttcagaggtgatggtgatccacaggatgtatgtgaggctagctgatctgaatgtggggcagctcgagggagccgagaaagtgaagcggttgtatgtgtttgcggacgtggtggagctaccagtcgtggaatggcggtggccgccgcaaataccaggatcggtgacggtgatcatattgtgtcgtcttcttcaatggccaactgatgggaggcagtcggacaccgagctccacctgacattcatgaagttgcatgccatacaacgagaggaaaatcggtgggagataaccgcagcagatggcatgaactggggagtttacatacacgcagaggaagtacaggttggcgtgctgacaatgtcatggtcttcggtacttagagtttcggcacttcgctctgttataacctccggctttcgcgccgttagtgtgtttgaggtaccgggaagtgtaaggtccacccttggagctactttaaggcccgatcacgccttatatagtacaactatgcaagccacacccaacgcatcgcatattagtgcttttaaccttcgcatagtttccccgtcggcatatcgtgtttgtcctctccaaaatgacacagatacctacttaggtattccagcagacgtggcggcagttcttccagtagacgtggtgactgatcctaacatcttgctgggcatgcagacaacggtacacattgcggagctagtcaaggcatgtcatccgtcacccgatgttgtgagcgctgtaggggagcacctgaactggctcaacaaactcttactcccacttaaggaatcgactcagttgcaaggaagcgagtcgtacaaggagtgccttgcactcttgggtcgtgttcacgctgcgatgaagatggtgagaattggcttagtagtgccccagctgcaatacagaatgtacggtagcctcatcaaccaaatggcccaagtagcacaaaactacgaccgagaattcaagcaattcaaattattcatcatccaaaatcaaatccttggcagctatttgctgcagcagaacagggcatttgctgagagggagctgcagatggagagctttcatgctgctgtcatttctcaaagaagggaggagttggacaatacattcgcaaagatggaccgattgagcgggcaaatggaggcagagagtagtgcaatggagcaagccaaaaaggaaatggacgaaggattgaggcagttccagaataggcaagttgcgaacgccctctttgccgttcttagcgctgtagctcagattgggcttgcattccttacggctggtgcaacggctcctggagctgtggcgtcggcggggcaagctgtgagcatagcaggtcaggcggcgcaaggtctgcgaagggtggtggaaattctagagcagctggaggctgtgatggaggttgtggctgctgtgaaggacctcgtggattcattggaacaggtaggtcagattgtggacgcaccggtgatgccggaattgccctcagaggcggactggtccatttttgtgaacgaggtggaggccgtggcagagggcatgccaacggaagtctcggaggttccggtgtggcacggcaagtgcaagaatgtggctgcactgggtcgggagatgagcatcacggcagtacagatgtcggagctgcagtatgacatctgggtgcaaggcatgatgcgggatatggctcgaagccaggcagacaggctggccgcaattcaacccgcggaccttaccaactatttggagatggctacccagatggatatgcggactacgaggatgctgctggggctcctcaacatattgcgcatccagaatgcggcgctcaggtacgagtatcttctaatgcccacggagctcacaacatggccactgggtatggataccgtgggtgacttgctcatcgcgcaggagaatgctgcactgataggattaatgcagctagggccctcatctgatttcacgagcaggcatgtggtgaaagacatacctgtgaacttgctgctcgatggcgaggattgggagtttgagattcctgtgcaagctggcatgtccagcttcccttccagctggtctcgcgtccgtattcggcacctggagatgcactttgtgaaggaggccagcggtattggtggtgagattatccaccagcctaccacccagactgggaccgtttacatccttctgcagggttccactatcttccatgaccgcagaagagaccaggtgttgccttttcaggccgctgctccgctcaactaccattacgcgtaccgcctcgacaccggcgactccactctcacaaacgaaccctctgaacagtttgccaacaagttcatgcagatgacacccttcacccgttggaggcttcgtctgtctgcgtccgcaaaagagaatgcaggattagcctttcccacggctacagcacttgactccactacccagattgtcatcactttccatgttacggccatcagacaaattgactggcggcacgacgaagag

SEQ ID NO: 302 - DNA, 2601 bp, synthetic construct
  misc_feature 1..2601: note = Synthetic
  source 1..2601: mol_type = other DNA
atggctctcgtggattacggcaagcttttcgaggatctgaaccagataagcatgggtgtactggatcgggtagagttttcagaggtgatggtgatccacaggatgtatgtgaggctagctgatctgaatgtggggcagctcgagggagccgagaaagtgaagcggttgtatgtgtttgcggacgtggtggagctaccagtcgtggaatggcggtggccgccgcaaataccaggatcggtgacggtgatcatattgtgtcgtcttcttcaatggccaactgatgggaggcagtcggacaccgagctccacctgacattcatgaagttgcatgccatacaacgagaggaaaatcggtgggagataaccgcagcagatggcatgaactggggagtttacatacacgcagaggaagtacaggttggcgtgctgacaatgtcatggtcttcggtacttagagtttcggcacttcgctctgttataacctccggctttcgcgccgttagtgtgtttgaggtaccgggaagtgtaaggtccacccttggagctactttaaggcccgatcacgccttatatagtacaactatgcaagccacacccaacgcatcgcatattagtgcttttaaccttcgcatagtttccccgtcggcatatcgtgtttgtcctctccaaaatgacacagatacctacttaggtattccagcagacgtggcggcagttcttccagtagacgtggtgactgatcctaacatcttgctgggcatgcagacaacggtacacattgcggagctagtcaaggcatgtcatccgtcacccgatgttgtgagcgctgtaggggagcacctgaactggctcaacaaactcttactcccacttaaggaatcgactcagttgcaaggaagcgagtcgtacaaggagtgccttgcactcttgggtcgtgttcacgctgcgatgaagatggtgagaattggcttagtagtgccccagctgcaatacagaatgtacggtagcctcatcaaccaaatggcccaagtagcacaaaactacgaccgagaattcaagcaattcaaattattcatcatccaaaatcaaatccttggcagctatttgctgcagcagaacagggcatttgctgagagggagctgcagatggagagctttcatgctgctgtcatttctcaaagaagggaggagttggacaatacattcgcaaagatggaccgattgagcgggcaaatggaggcagagagtagtgcaatggagcaagccaaaaaggaaatggacgaaggattgaggcagttccagaataggcaagttgcgaacgccctctttgccgttcttagcgctgtagctcagattgggcttgcattccttacggctggtgcaacggctcctggagctgtggcgtcggcggggcaagctgtgagcatagcaggtcaggcggcgcaaggtctgcgaagggtggtggaaattctagagcagctggaggctgtgatggaggttgtggctgctgtgaaggacctcgtggattcattggaacaggtaggtcagattgtggacgcaccggtgatgccggaattgccctcagaggcggactggtccatttttgtgaacgaggtggaggccgtggcagagggcatgccaacggaagtctcggaggttccggtgtggatcgccaagtgcaagtgcgtggctgcactgggtcgggagatgagcatcacggcagtacagatgtcggagctgcagtatgacatctgggtgcaaggcatgatgcgggatatggctcgaagccaggcagacaggctggccgcaattcaacccgcggaccttaccaactatttggagatggctacccagatggatatgcggactacgaggatgctgctggggctcctcaacatattgcgcatccagaatgcggcgctcaggtacgagtatcttctaatgcccacggagctcacaacatggccactgggtatggataccgtgggtgacttgctcatcgcgcaggagaatgctgcactgataggattaatgcagctagggccctcatctgatttcacgagcaggcatgtggtgaaagacatacctgtgaacttgctgctcgatggcgaggattgggagtttgagattcctgtgcaagctggcatgtccagcttcccttccagctggtctcgcgtccgtattcggcacctggagatgcactttgtgaaggaggccagcggtattggtggtgagattatccaccagcctaccacccagactgggaccgtttacatccttctgcagggttccactatcttccatgaccgcagaagagaccaggtgttgccttttcaggccgctgctccgctcaactaccattacgcgtaccgcctcgacaccggcgactccactctcacaaacgaaccctctgaacagtttgccaacaagttcatgcagatgacacccttcacccgttggaggcttcgtctgtctgcgtccgcaaaagagaatgcaggattagcctttcccacggctacagcacttgactccactacccagattgtcatcactttccatgttacggccatcagacaaattgactggcggcacgacgaagag

SEQ ID NO: 303 - DNA, 2601 bp, synthetic construct
  misc_feature 1..2601: note = Synthetic
  source 1..2601: mol_type = other DNA
atggctctcgtggattacggcaagcttttcgaggatctgaaccagataagcatgggtgtactggatcgggtagagttttcagaggtgatggtgatccacaggatgtatgtgaggctagctgatctgaatgtggggcagctcgagggagccgagaaagtgaagcggttgtatgtgtttgcggacgtggtggagctaccagtcgtggaatggcggtggccgccgcaaataccaggatcggtgacggtgatcatattgtgtcgtcttcttcaatggccaactgatgggaggcagtcggacaccgagctccacctgacattcatgaagttgcatgccatacaacgagaggaaaatcggtgggagataaccgcagcagatggcatgaactggggagtttacatacacgcagaggaagtacaggttggcgtgctgacaatgtcatggtcttcggtacttagagtttcggcacttcgctctgttataacctccggctttcgcgccgttagtgtgtttgaggtaccgggaagtgtaaggtccacccttggagctactttaaggcccgatcacgccttatatagtacaactatgcaagccacacccaacgcatcgcatattagtgcttttaaccttcgcatagtttccccgtcggcatatcgtgtttgtcctctccaaaatgacacagatacctacttaggtattccagcagacgtggcggcagttcttccagtagacgtggtgactgatcctaacatcttgctgggcatgcagacaacggtacacattgcggagctagtcaaggcatgtcatccgtcacccgatgttgtgagcgctgtaggggagcacctgaactggctcaacaaactcttactcccacttaaggaatcgactcagttgcaaggaagcgagtcgtacaaggagtgccttgcactcttgggtcgtgttcacgctgcgatgaagatggtgagaattggcttagtagtgccccagctgcaatacagaatgtacggtagcctcatcaaccaaatggcccaagtagcacaaaactacgaccgagaattcaagcaattcaaattattcatcatccaaaatcaaatccttggcagctatttgctgcagcagaacagggcatttgctgagagggagctgcagatggagagctttcatgctgctgtcatttctcaaagaagggaggagttggacaatacattcgcaaagatggaccgattgagcgggcaaatggaggcagagagtagtgcaatggagcaagccaaaaaggaaatggacgaaggattgaggcagttccagaataggcaagttgcgaacgccctctttgccgttcttagcgctgtagctcagattgggcttgcattccttacggctggtgcaacggctcctggagctgtggcgtcggcggggcaagctgtgagcatagcaggtcaggcggcgcaaggtctgcgaagggtggtggaaattctagagcagctggaggctgtgatggaggttgtggctgctgtgaaggacctcgtggattcattggaacaggtaggtcagattgtggacgcaccggtgatgccggaattgccctcagaggcggactggtccatttttgtgaacgaggtggaggccgtggcagagggcatgccaacggaagtctcggaggttccggtgtggatcgccaagtgcaagagcgtggctgcactgggtcgggagatgagcatcacggcagtacagatgtcggagctgcagtatgacatctgggtgcaaggcatgatgcgggatatggctcgaagccaggcagacaggctggccgcaattcaacccgcggaccttaccaactatttggagatggctacccagatggatatgcggactacgaggatgctgctggggctcctcaacatattgcgcatccagaatgcggcgctcaggtacgagtatcttctaatgcccacggagctcacaacatggccactgggtatggataccgtgggtgacttgctcatcgcgcaggagaatgctgcactgataggattaatgcagctagggccctcatctgatttcacgagcaggcatgtggtgaaagacatacctgtgaacttgctgctcgatggcgaggattgggagtttgagattcctgtgcaagctggcatgtccagcttcccttccagctggtctcgcgtccgtattcggcacctggagatgcactttgtgaaggaggccagcggtattggtggtgagattatccaccagcctaccacccagactgggaccgtttacatccttctgcagggttccactatcttccatgaccgcagaagagaccaggtgttgccttttcaggccgctgctccgctcaactaccattacgcgtaccgcctcgacaccggcgactccactctcacaaacgaaccctctgaacagtttgccaacaagttcatgcagatgacacccttcacccgttggaggcttcgtctgtctgcgtccgcaaaagagaatgcaggattagcctttcccacggctacagcacttgactccactacccagattgtcatcactttccatgttacggccatcagacaaattgactggcggcacgacgaagag

SEQ ID NO: 304 - DNA, 2601 bp, synthetic construct
  misc_feature 1..2601: note = Synthetic
  source 1..2601: mol_type = other DNA
atggctctcgtggattacggcaagcttttcgaggatctgaaccagataagcatgggtgtactggatcgggtagagttttcagaggtgatggtgatccacaggatgtatgtgaggctagctgatctgaatgtggggcagctcgagggagccgagaaagtgaagcggttgtatgtgtttgcggacgtggtggagctaccagtcgtggaatggcggtggccgccgcaaataccaggatcggtgacggtgatcatattgtgtcgtcttcttcaatggccaactgatgggaggcagtcggacaccgagctccacctgacattcatgaagttgcatgccatacaacgagaggaaaatcggtgggagataaccgcagcagatggcatgaactggggagtttacatacacgcagaggaagtacaggttggcgtgctgacaatgtcatggtcttcggtacttagagtttcggcacttcgctctgttataacctccggctttcgcgccgttagtgtgtttgaggtaccgggaagtgtaaggtccacccttggagctactttaaggcccgatcacgccttatatagtacaactatgcaagccacacccaacgcatcgcatattagtgcttttaaccttcgcatagtttccccgtcggcatatcgtgtttgtcctctccaaaatgacacagatacctacttaggtattccagcagacgtggcggcagttcttccagtagacgtggtgactgatcctaacatcttgctgggcatgcagacaacggtacacattgcggagctagtcaaggcatgtcatccgtcacccgatgttgtgagcgctgtaggggagcacctgaactggctcaacaaactcttactcccacttaaggaatcgactcagttgcaaggaagcgagtcgtacaaggagtgccttgcactcttgggtcgtgttcacgctgcgatgaagatggtgagaattggcttagtagtgccccagctgcaatacagaatgtacggtagcctcatcaaccaaatggcccaagtagcacaaaactacgaccgagaattcaagcaattcaaattattcatcatccaaaatcaaatccttggcagctatttgctgcagcagaacagggcatttgctgagagggagctgcagatggagagctttcatgctgctgtcatttctcaaagaagggaggagttggacaatacattcgcaaagatggaccgattgagcgggcaaatggaggcagagagtagtgcaatggagcaagccaaaaaggaaatggacgaaggattgaggcagttccagaataggcaagttgcgaacgccctctttgccgttcttagcgctgtagctcagattgggcttgcattccttacggctggtgcaacggctcctggagctgtggcgtcggcggggcaagctgtgagcatagcaggtcaggcggcgcaaggtctgcgaagggtggtggaaattctagagcagctggaggctgtgatggaggttgtggctgctgtgaaggacctcgtggattcattggaacaggtaggtcagattgtggacgcaccggtgatgccggaattgccctcagaggcggactggtccatttttgtgaacgaggtggaggccgtggcagagggcatgccaacggaagtctcggaggttccggtgtggatcggcaagtgcaagaatgtggctgcactgggtcgggagatgagcatcacggcagtacagatgtcggagctgcagtatgacatctgggtgcaaggcatgatgcgggatatggctcgaagccaggcagacaggctggccgcaattcaacccgcggaccttaccaactatttggagatggctacccagatggatatgcggactacgaggatgctgctggggctcctcaacatattgcgcatccagaatgcggcgctcaggtacgagtatcttctaatgcccacggagctcacaacatggccactgggtatggataccgtgggtgacttgctcatcgcgcaggagaatgctgcactgataggattaatgcagctagggccctcatctgatttcacgagcaggcatgtggtgaaagacatacctgtgaacttgctgctcgatggcgaggattgggagtttgagattcctgtgcaagctggcatgtccagcttcccttccagctggtctcgcgtccgtattcggcacctggagatgcactttgtgaaggaggccagcggtattggtggtgagattatccaccagcctaccacccagactgggaccgtttacatccttctgcagggttccactatcttccatgaccgcagaagagaccaggtgttgccttttcaggccgctgctccgctcaactaccattacgcgtaccgcctcgacaccggcgactccactctcacaaacgaaccctctgaacagtttgccaacaagttcatgcagatgacacccttcacccgttggaggcttcgtctgtctgcgtccgcaaaagagaatgcaggattagcctttcccacggctacagcacttgactccactacccagattgtcatcactttccatgttacggccatcagacaaattgactggcggcacgacgaagag

SEQ ID NO: 305 - DNA, 2601 bp, synthetic construct
  misc_feature 1..2601: note = Synthetic
  source 1..2601: mol_type = other DNA
atggctctcgtggattacggcaagcttttcgaggatctgaaccagataagcatgggtgtactggatcgggtagagttttcagaggtgatggtgatccacaggatgtatgtgaggctagctgatctgaatgtggggcagctcgagggagccgagaaagtgaagcggttgtatgtgtttgcggacgtggtggagctaccagtcgtggaatggcggtggccgccgcaaataccaggatcggtgacggtgatcatattgtgtcgtcttcttcaatggccaactgatgggaggcagtcggacaccgagctccacctgacattcatgaagttgcatgccatacaacgagaggaaaatcggtgggagataaccgcagcagatggcatgaactggggagtttacatacacgcagaggaagtacaggttggcgtgctgacaatgtcatggtcttcggtacttagagtttcggcacttcgctctgttataacctccggctttcgcgccgttagtgtgtttgaggtaccgggaagtgtaaggtccacccttggagctactttaaggcccgatcacgccttatatagtacaactatgcaagccacacccaacgcatcgcatattagtgcttttaaccttcgcatagtttccccgtcggcatatcgtgtttgtcctctccaaaatgacacagatacctacttaggtattccagcagacgtggcggcagttcttccagtagacgtggtgactgatcctaacatcttgctgggcatgcagacaacggtacacattgcggagctagtcaaggcatgtcatccgtcacccgatgttgtgagcgctgtaggggagcacctgaactggctcaacaaactcttactcccacttaaggaatcgactcagttgcaaggaagcgagtcgtacaaggagtgccttgcactcttgggtcgtgttcacgctgcgatgaagatggtgagaattggcttagtagtgccccagctgcaatacagaatgtacggtagcctcatcaaccaaatggcccaagtagcacaaaactacgaccgagaattcaagcaattcaaattattcatcatccaaaatcaaatccttggcagctatttgctgcagcagaacagggcatttgctgagagggagctgcagatggagagctttcatgctgctgtcatttctcaaagaagggaggagttggacaatacattcgcaaagatggaccgattgagcgggcaaatggaggcagagagtagtgcaatggagcaagccaaaaaggaaatggacgaaggattgaggcagttccagaataggcaagttgcgaacgccctctttgccgttcttagcgctgtagctcagattgggcttgcattccttacggctggtgcaacggctcctggagctgtggcgtcggcggggcaagctgtgagcatagcaggtcaggcggcgcaaggtctgcgaagggtggtggaaattctagagcagctggaggctgtgatggaggttgtggctgctgtgaaggacctcgtggattcattggaacaggtaggtcagattgtggacgcaccggtgatgccggaattgccctcagaggcggactggtccatttttgtgaacgaggtggaggccgtggcagagggcatgccaacggaagtctcggaggttccggtgtggatcggcaagtgcaagtccgtggctgcactgggtcgggagatgagcatcacggcagtacagatgtcggagctgcagtatgacatctgggtgcaaggcatgatgcgggatatggctcgaagccaggcagacaggctggccgcaattcaacccgcggaccttaccaactatttggagatggctacccagatggatatgcggactacgaggatgctgctggggctcctcaacatattgcgcatccagaatgcggcgctcaggtacgagtatcttctaatgcccacggagctcacaacatggccactgggtatggataccgtgggtgacttgctcatcgcgcaggagaatgctgcactgataggattaatgcagctagggccctcatctgatttcacgagcaggcatgtggtgaaagacatacctgtgaacttgctgctcgatggcgaggattgggagtttgagattcctgtgcaagctggcatgtccagcttcccttccagctggtctcgcgtccgtattcggcacctggagatgcactttgtgaaggaggccagcggtattggtggtgagattatccaccagcctaccacccagactgggaccgtttacatccttctgcagggttccactatcttccatgaccgcagaagagaccaggtgttgccttttcaggccgctgctccgctcaactaccattacgcgtaccgcctcgacaccggcgactccactctcacaaacgaaccctctgaacagtttgccaacaagttcatgcagatgacacccttcacccgttggaggcttcgtctgtctgcgtccgcaaaagagaatgcaggattagcctttcccacggctacagcacttgactccactacccagattgtcatcactttccatgttacggccatcagacaaattgactggcggcacgacgaagag

SEQ ID NO: 306 - DNA, 2601 bp, synthetic construct
  misc_feature 1..2601: note = Synthetic
  source 1..2601: mol_type = other DNA
atggctctcgtggattacggcaagcttttcgaggatctgaaccagataagcatgggtgtactggatcgggtagagttttcagaggtgatggtgatccacaggatgtatgtgaggctagctgatctgaatgtggggcagctcgagggagccgagaaagtgaagcggttgtatgtgtttgcggacgtggtggagctaccagtcgtggaatggcggtggccgccgcaaataccaggatcggtgacggtgatcatattgtgtcgtcttcttcaatggccaactgatgggaggcagtcggacaccgagctccacctgacattcatgaagttgcatgccatacaacgagaggaaaatcggtgggagataaccgcagcagatggcatgaactggggagtttacatacacgcagaggaagtacaggttggcgtgctgacaatgtcatggtcttcggtacttagagtttcggcacttcgctctgttataacctccggctttcgcgccgttagtgtgtttgaggtaccgggaagtgtaaggtccacccttggagctactttaaggcccgatcacgccttatatagtacaactatgcaagccacacccaacgcatcgcatattagtgcttttaaccttcgcatagtttccccgtcggcatatcgtgtttgtcctctccaaaatgacacagatacctacttaggtattccagcagacgtggcggcagttcttccagtagacgtggtgactgatcctaacatcttgctgggcatgcagacaacggtacacattgcggagctagtcaaggcatgtcatccgtcacccgatgttgtgagcgctgtaggggagcacctgaactggctcaacaaactcttactcccacttaaggaatcgactcagttgcaaggaagcgagtcgtacaaggagtgccttgcactcttgggtcgtgttcacgctgcgatgaagatggtgagaattggcttagtagtgccccagctgcaatacagaatgtacggtagcctcatcaaccaaatggcccaagtagcacaaaactacgaccgagaattcaagcaattcaaattattcatcatccaaaatcaaatccttggcagctatttgctgcagcagaacagggcatttgctgagagggagctgcagatggagagctttcatgctgctgtcatttctcaaagaagggaggagttggacaatacattcgcaaagatggaccgattgagcgggcaaatggaggcagagagtagtgcaatggagcaagccaaaaaggaaatggacgaaggattgaggcagttccagaataggcaagttgcgaacgccctctttgccgttcttagcgctgtagctcagattgggcttgcattccttacggctggtgcaacggctcctggagctgtggcgtcggcggggcaagctgtgagcatagcaggtcaggcggcgcaaggtctgcgaagggtggtggaaattctagagcagctggaggctgtgatggaggttgtggctgctgtgaaggacctcgtggattcattggaacaggtaggtcagattgtggacgcaccggtgatgccggaattgccctcagaggcggactggtccatttttgtgaacgaggtggaggccgtggcagagggcatgccaacggaagtctcggaggttccggtgtggatcggcaagtgcaacaatgtggctgcactgggtcgggagatgagcatcacggcagtacagatgtcggagctgcagtatgacatctgggtgcaaggcatgatgcgggatatggctcgaagccaggcagacaggctggccgcaattcaacccgcggaccttaccaactatttggagatggctacccagatggatatgcggactacgaggatgctgctggggctcctcaacatattgcgcatccagaatgcggcgctcaggtacgagtatcttctaatgcccacggagctcacaacatggccactgggtatggataccgtgggtgacttgctcatcgcgcaggagaatgctgcactgataggattaatgcagctagggccctcatctgatttcacgagcaggcatgtggtgaaagacatacctgtgaacttgctgctcgatggcgaggattgggagtttgagattcctgtgcaagctggcatgtccagcttcccttccagctggtctcgcgtccgtattcggcacctggagatgcactttgtgaaggaggccagcggtattggtggtgagattatccaccagcctaccacccagactgggaccgtttacatccttctgcagggttccactatcttccatgaccgcagaagagaccaggtgttgccttttcaggccgctgctccgctcaactaccattacgcgtaccgcctcgacaccggcgactccactctcacaaacgaaccctctgaacagtttgccaacaagttcatgcagatgacacccttcacccgttggaggcttcgtctgtctgcgtccgcaaaagagaatgcaggattagcctttcccacggctacagcacttgactccactacccagattgtcatcactttccatgttacggccatcagacaaattgactggcggcacgacgaagag

SEQ ID NO: 307 - DNA, 2601 bp, synthetic construct
  misc_feature 1..2601: note = Synthetic
  source 1..2601: mol_type = other DNA
atggctctcgtggattacggcaagcttttcgaggatctgaaccagataagcatgggtgtactggatcgggtagagttttcagaggtgatggtgatccacaggatgtatgtgaggctagctgatctgaatgtggggcagctcgagggagccgagaaagtgaagcggttgtatgtgtttgcggacgtggtggagctaccagtcgtggaatggcggtggccgccgcaaataccaggatcggtgacggtgatcatattgtgtcgtcttcttcaatggccaactgatgggaggcagtcggacaccgagctccacctgacattcatgaagttgcatgccatacaacgagaggaaaatcggtgggagataaccgcagcagatggcatgaactggggagtttacatacacgcagaggaagtacaggttggcgtgctgacaatgtcatggtcttcggtacttagagtttcggcacttcgctctgttataacctccggctttcgcgccgttagtgtgtttgaggtaccgggaagtgtaaggtccacccttggagctactttaaggcccgatcacgccttatatagtacaactatgcaagccacacccaacgcatcgcatattagtgcttttaaccttcgcatagtttccccgtcggcatatcgtgtttgtcctctccaaaatgacacagatacctacttaggtattccagcagacgtggcggcagttcttccagtagacgtggtgactgatcctaacatcttgctgggcatgcagacaacggtacacattgcggagctagtcaaggcatgtcatccgtcacccgatgttgtgagcgctgtaggggagcacctgaactggctcaacaaactcttactcccacttaaggaatcgactcagttgcaaggaagcgagtcgtacaaggagtgccttgcactcttgggtcgtgttcacgctgcgatgaagatggtgagaattggcttagtagtgccccagctgcaatacagaatgtacggtagcctcatcaaccaaatggcccaagtagcacaaaactacgaccgagaattcaagcaattcaaattattcatcatccaaaatcaaatccttggcagctatttgctgcagcagaacagggcatttgctgagagggagctgcagatggagagctttcatgctgctgtcatttctcaaagaagggaggagttggacaatacattcgcaaagatggaccgattgagcgggcaaatggaggcagagagtagtgcaatggagcaagccaaaaaggaaatggacgaaggattgaggcagttccagaataggcaagttgcgaacgccctctttgccgttcttagcgctgtagctcagattgggcttgcattccttacggctggtgcaacggctcctggagctgtggcgtcggcggggcaagctgtgagcatagcaggtcaggcggcgcaaggtctgcgaagggtggtggaaattctagagcagctggaggctgtgatggaggttgtggctgctgtgaaggacctcgtggattcattggaacaggtaggtcagattgtggacgcaccggtgatgccggaattgccctcagaggcggactggtccatttttgtgaacgaggtggaggccgtggcagagggcatgccaacggaagtctcggaggttccggtgtggatcgtcaagtgcaagagcgtggctgcactgggtcgggagatgagcatcacggcagtacagatgtcggagctgcagtatgacatctgggtgcaaggcatgatgcgggatatggctcgaagccaggcagacaggctggccgcaattcaacccgcggaccttaccaactatttggagatggctacccagatggatatgcggactacgaggatgctgctggggctcctcaacatattgcgcatccagaatgcggcgctcaggtacgagtatcttctaatgcccacggagctcacaacatggccactgggtatggataccgtgggtgacttgctcatcgcgcaggagaatgctgcactgataggattaatgcagctagggccctcatctgatttcacgagcaggcatgtggtgaaagacatacctgtgaacttgctgctcgatggcgaggattgggagtttgagattcctgtgcaagctggcatgtccagcttcccttccagctggtctcgcgtccgtattcggcacctggagatgcactttgtgaaggaggccagcggtattggtggtgagattatccaccagcctaccacccagactgggaccgtttacatccttctgcagggttccactatcttccatgaccgcagaagagaccaggtgttgccttttcaggccgctgctccgctcaactaccattacgcgtaccgcctcgacaccggcgactccactctcacaaacgaaccctctgaacagtttgccaacaagttcatgcagatgacacccttcacccgttggaggcttcgtctgtctgcgtccgcaaaagagaatgcaggattagcctttcccacggctacagcacttgactccactacccagattgtcatcactttccatgttacggccatcagacaaattgactggcggcacgacgaagag

SEQ ID NO: 308 - DNA, 2601 bp, synthetic construct
  misc_feature 1..2601: note = Synthetic
  source 1..2601: mol_type = other DNA
atggctctcgtggattacggcaagcttttcgaggatctgaaccagataagcatgggtgtactggatcgggtagagttttcagaggtgatggtgatccacaggatgtatgtgaggctagctgatctgaatgtggggcagctcgagggagccgagaaagtgaagcggttgtatgtgtttgcggacgtggtggagctaccagtcgtggaatggcggtggccgccgcaaataccaggatcggtgacggtgatcatattgtgtcgtcttcttcaatggccaactgatgggaggcagtcggacaccgagctccacctgacattcatgaagttgcatgccatacaacgagaggaaaatcggtgggagataaccgcagcagatggcatgaactggggagtttacatacacgcagaggaagtacaggttggcgtgctgacaatgtcatggtcttcggtacttagagtttcggcacttcgctctgttataacctccggctttcgcgccgttagtgtgtttgaggtaccgggaagtgtaaggtccacccttggagctactttaaggcccgatcacgccttatatagtacaactatgcaagccacacccaacgcatcgcatattagtgcttttaaccttcgcatagtttccccgtcggcatatcgtgtttgtcctctccaaaatgacacagatacctacttaggtattccagcagacgtggcggcagttcttccagtagacgtggtgactgatcctaacatcttgctgggcatgcagacaacggtacacattgcggagctagtcaaggcatgtcatccgtcacccgatgttgtgagcgctgtaggggagcacctgaactggctcaacaaactcttactcccacttaaggaatcgactcagttgcaaggaagcgagtcgtacaaggagtgccttgcactcttgggtcgtgttcacgctgcgatgaagatggtgagaattggcttagtagtgccccagctgcaatacagaatgtacggtagcctcatcaaccaaatggcccaagtagcacaaaactacgaccgagaattcaagcaattcaaattattcatcatccaaaatcaaatccttggcagctatttgctgcagcagaacagggcatttgctgagagggagctgcagatggagagctttcatgctgctgtcatttctcaaagaagggaggagttggacaatacattcgcaaagatggaccgattgagcgggcaaatggaggcagagagtagtgcaatggagcaagccaaaaaggaaatggacgaaggattgaggcagttccagaataggcaagttgcgaacgccctctttgccgttcttagcgctgtagctcagattgggcttgcattccttacggctggtgcaacggctcctggagctgtggcgtcggcggggcaagctgtgagcatagcaggtcaggcggcgcaaggtctgcgaagggtggtggaaattctagagcagctggaggctgtgatggaggttgtggctgctgtgaaggacctcgtggattcattggaacaggtaggtcagattgtggacgcaccggtgatgccggaattgccctcagaggcggactggtccatttttgtgaacgaggtggaggccgtggcagagggcatgccaacggaagtctcggaggttccggtgtggctggccaggtgcaagaatgtggctgcactgggtcgggagatgagcatcacggcagtacagatgtcggagctgcagtatgacatctgggtgcaaggcatgatgcgggatatggctcgaagccaggcagacaggctggccgcaattcaacccgcggaccttaccaactatttggagatggctacccagatggatatgcggactacgaggatgctgctggggctcctcaacatattgcgcatccagaatgcggcgctcaggtacgagtatcttctaatgcccacggagctcacaacatggccactgggtatggataccgtgggtgacttgctcatcgcgcaggagaatgctgcactgataggattaatgcagctagggccctcatctgatttcacgagcaggcatgtggtgaaagacatacctgtgaacttgctgctcgatggcgaggattgggagtttgagattcctgtgcaagctggcatgtccagcttcccttccagctggtctcgcgtccgtattcggcacctggagatgcactttgtgaaggaggccagcggtattggtggtgagattatccaccagcctaccacccagactgggaccgtttacatccttctgcagggttccactatcttccatgaccgcagaagagaccaggtgttgccttttcaggccgctgctccgctcaactaccattacgcgtaccgcctcgacaccggcgactccactctcacaaacgaaccctctgaacagtttgccaacaagttcatgcagatgacacccttcacccgttggaggcttcgtctgtctgcgtccgcaaaagagaatgcaggattagcctttcccacggctacagcacttgactccactacccagattgtcatcactttccatgttacggccatcagacaaattgactggcggcacgacgaagag

SEQ ID NO: 309 - DNA, 2601 bp, synthetic construct
  misc_feature 1..2601: note = Synthetic
  source 1..2601: mol_type = other DNA
atggctctcgtggattacggcaagcttttcgaggatctgaaccagataagcatgggtgtactggatcgggtagagttttcagaggtgatggtgatccacaggatgtatgtgaggctagctgatctgaatgtggggcagctcgagggagccgagaaagtgaagcggttgtatgtgtttgcggacgtggtggagctaccagtcgtggaatggcggtggccgccgcaaataccaggatcggtgacggtgatcatattgtgtcgtcttcttcaatggccaactgatgggaggcagtcggacaccgagctccacctgacattcatgaagttgcatgccatacaacgagaggaaaatcggtgggagataaccgcagcagatggcatgaactggggagtttacatacacgcagaggaagtacaggttggcgtgctgacaatgtcatggtcttcggtacttagagtttcggcacttcgctctgttataacctccggctttcgcgccgttagtgtgtttgaggtaccgggaagtgtaaggtccacccttggagctactttaaggcccgatcacgccttatatagtacaactatgcaagccacacccaacgcatcgcatattagtgcttttaaccttcgcatagtttccccgtcggcatatcgtgtttgtcctctccaaaatgacacagatacctacttaggtattccagcagacgtggcggcagttcttccagtagacgtggtgactgatcctaacatcttgctgggcatgcagacaacggtacacattgcggagctagtcaaggcatgtcatccgtcacccgatgttgtgagcgctgtaggggagcacctgaactggctcaacaaactcttactcccacttaaggaatcgactcagttgcaaggaagcgagtcgtacaaggagtgccttgcactcttgggtcgtgttcacgctgcgatgaagatggtgagaattggcttagtagtgccccagctgcaatacagaatgtacggtagcctcatcaaccaaatggcccaagtagcacaaaactacgaccgagaattcaagcaattcaaattattcatcatccaaaatcaaatccttggcagctatttgctgcagcagaacagggcatttgctgagagggagctgcagatggagagctttcatgctgctgtcatttctcaaagaagggaggagttggacaatacattcgcaaagatggaccgattgagcgggcaaatggaggcagagagtagtgcaatggagcaagccaaaaaggaaatggacgaaggattgaggcagttccagaataggcaagttgcgaacgccctctttgccgttcttagcgctgtagctcagattgggcttgcattccttacggctggtgcaacggctcctggagctgtggcgtcggcggggcaagctgtgagcatagcaggtcaggcggcgcaaggtctgcgaagggtggtggaaattctagagcagctggaggctgtgatggaggttgtggctgctgtgaaggacctcgtggattcattggaacaggtaggtcagattgtggacgcaccggtgatgccggaattgccctcagaggcggactggtccatttttgtgaacgaggtggaggccgtggcagagggcatgccaacggaagtctcggaggttccggtgtggctcgccaggtgcaagagcgtggctgcactgggtcgggagatgagcatcacggcagtacagatgtcggagctgcagtatgacatctgggtgcaaggcatgatgcgggatatggctcgaagccaggcagacaggctggccgcaattcaacccgcggaccttaccaactatttggagatggctacccagatggatatgcggactacgaggatgctgctggggctcctcaacatattgcgcatccagaatgcggcgctcaggtacgagtatcttctaatgcccacggagctcacaacatggccactgggtatggataccgtgggtgacttgctcatcgcgcaggagaatgctgcactgataggattaatgcagctagggccctcatctgatttcacgagcaggcatgtggtgaaagacatacctgtgaacttgctgctcgatggcgaggattgggagtttgagattcctgtgcaagctggcatgtccagcttcccttccagctggtctcgcgtccgtattcggcacctggagatgcactttgtgaaggaggccagcggtattggtggtgagattatccaccagcctaccacccagactgggaccgtttacatccttctgcagggttccactatcttccatgaccgcagaagagaccaggtgttgccttttcaggccgctgctccgctcaactaccattacgcgtaccgcctcgacaccggcgactccactctcacaaacgaaccctctgaacagtttgccaacaagttcatgcagatgacacccttcacccgttggaggcttcgtctgtctgcgtccgcaaaagagaatgcaggattagcctttcccacggctacagcacttgactccactacccagattgtcatcactttccatgttacggccatcagacaaattgactggcggcacgacgaagag

SEQ ID NO: 310 - DNA, 2601 bp, synthetic construct
  misc_feature 1..2601: note = Synthetic
  source 1..2601: mol_type = other DNA
atggctctcgtggattacggcaagcttttcgaggatctgaaccagataagcatgggtgtactggatcgggtagagttttcagaggtgatggtgatccacaggatgtatgtgaggctagctgatctgaatgtggggcagctcgagggagccgagaaagtgaagcggttgtatgtgtttgcggacgtggtggagctaccagtcgtggaatggcggtggccgccgcaaataccaggatcggtgacggtgatcatattgtgtcgtcttcttcaatggccaactgatgggaggcagtcggacaccgagctccacctgacattcatgaagttgcatgccatacaacgagaggaaaatcggtgggagataaccgcagcagatggcatgaactggggagtttacatacacgcagaggaagtacaggttggcgtgctgacaatgtcatggtcttcggtacttagagtttcggcacttcgctctgttataacctccggctttcgcgccgttagtgtgtttgaggtaccgggaagtgtaaggtccacccttggagctactttaaggcccgatcacgccttatatagtacaactatgcaagccacacccaacgcatcgcatattagtgcttttaaccttcgcatagtttccccgtcggcatatcgtgtttgtcctctccaaaatgacacagatacctacttaggtattccagcagacgtggcggcagttcttccagtagacgtggtgactgatcctaacatcttgctgggcatgcagacaacggtacacattgcggagctagtcaaggcatgtcatccgtcacccgatgttgtgagcgctgtaggggagcacctgaactggctcaacaaactcttactcccacttaaggaatcgactcagttgcaaggaagcgagtcgtacaaggagtgccttgcactcttgggtcgtgttcacgctgcgatgaagatggtgagaattggcttagtagtgccccagctgcaatacagaatgtacggtagcctcatcaaccaaatggcccaagtagcacaaaactacgaccgagaattcaagcaattcaaattattcatcatccaaaatcaaatccttggcagctatttgctgcagcagaacagggcatttgctgagagggagctgcagatggagagctttcatgctgctgtcatttctcaaagaagggaggagttggacaatacattcgcaaagatggaccgattgagcgggcaaatggaggcagagagtagtgcaatggagcaagccaaaaaggaaatggacgaaggattgaggcagttccagaataggcaagttgcgaacgccctctttgccgttcttagcgctgtagctcagattgggcttgcattccttacggctggtgcaacggctcctggagctgtggcgtcggcggggcaagctgtgagcatagcaggtcaggcggcgcaaggtctgcgaagggtggtggaaattctagagcagctggaggctgtgatggaggttgtggctgctgtgaaggacctcgtggattcattggaacaggtaggtcagattgtggacgcaccggtgatgccggaattgccctcagaggcggactggtccatttttgtgaacgaggtggaggccgtggcagagggcatgccaacggaagtctcggaggttccggtgtggctgggccggtgcaagaatgtggctgcactgggtcgggagatgagcatcacggcagtacagatgtcggagctgcagtatgacatctgggtgcaaggcatgatgcgggatatggctcgaagccaggcagacaggctggccgcaattcaacccgcggaccttaccaactatttggagatggctacccagatggatatgcggactacgaggatgctgctggggctcctcaacatattgcgcatccagaatgcggcgctcaggtacgagtatcttctaatgcccacggagctcacaacatggccactgggtatggataccgtgggtgacttgctcatcgcgcaggagaatgctgcactgataggattaatgcagctagggccctcatctgatttcacgagcaggcatgtggtgaaagacatacctgtgaacttgctgctcgatggcgaggattgggagtttgagattcctgtgcaagctggcatgtccagcttcccttccagctggtctcgcgtccgtattcggcacctggagatgcactttgtgaaggaggccagcggtattggtggtgagattatccaccagcctaccacccagactgggaccgtttacatccttctgcagggttccactatcttccatgaccgcagaagagaccaggtgttgccttttcaggccgctgctccgctcaactaccattacgcgtaccgcctcgacaccggcgactccactctcacaaacgaaccctctgaacagtttgccaacaagttcatgcagatgacacccttcacccgttggaggcttcgtctgtctgcgtccgcaaaagagaatgcaggattagcctttcccacggctacagcacttgactccactacccagattgtcatcactttccatgttacggccatcagacaaattgactggcggcacgacgaagag

SEQ ID NO: 311 - DNA, 2601 bp, synthetic construct
  misc_feature 1..2601: note = Synthetic
  source 1..2601: mol_type = other DNA
atggctctcgtggattacggcaagcttttcgaggatctgaaccagataagcatgggtgtactggatcgggtagagttttcagaggtgatggtgatccacaggatgtatgtgaggctagctgatctgaatgtggggcagctcgagggagccgagaaagtgaagcggttgtatgtgtttgcggacgtggtggagctaccagtcgtggaatggcggtggccgccgcaaataccaggatcggtgacggtgatcatattgtgtcgtcttcttcaatggccaactgatgggaggcagtcggacaccgagctccacctgacattcatgaagttgcatgccatacaacgagaggaaaatcggtgggagataaccgcagcagatggcatgaactggggagtttacatacacgcagaggaagtacaggttggcgtgctgacaatgtcatggtcttcggtacttagagtttcggcacttcgctctgttataacctccggctttcgcgccgttagtgtgtttgaggtaccgggaagtgtaaggtccacccttggagctactttaaggcccgatcacgccttatatagtacaactatgcaagccacacccaacgcatcgcatattagtgcttttaaccttcgcatagtttccccgtcggcatatcgtgtttgtcctctccaaaatgacacagatacctacttaggtattccagcagacgtggcggcagttcttccagtagacgtggtgactgatcctaacatcttgctgggcatgcagacaacggtacacattgcggagctagtcaaggcatgtcatccgtcacccgatgttgtgagcgctgtaggggagcacctgaactggctcaacaaactcttactcccacttaaggaatcgactcagttgcaaggaagcgagtcgtacaaggagtgccttgcactcttgggtcgtgttcacgctgcgatgaagatggtgagaattggcttagtagtgccccagctgcaatacagaatgtacggtagcctcatcaaccaaatggcccaagtagcacaaaactacgaccgagaattcaagcaattcaaattattcatcatccaaaatcaaatccttggcagctatttgctgcagcagaacagggcatttgctgagagggagctgcagatggagagctttcatgctgctgtcatttctcaaagaagggaggagttggacaatacattcgcaaagatggaccgattgagcgggcaaatggaggcagagagtagtgcaatggagcaagccaaaaaggaaatggacgaaggattgaggcagttccagaataggcaagttgcgaacgccctctttgccgttcttagcgctgtagctcagattgggcttgcattccttacggctggtgcaacggctcctggagctgtggcgtcggcggggcaagctgtgagcatagcaggtcaggcggcgcaaggtctgcgaagggtggtggaaattctagagcagctggaggctgtgatggaggttgtggctgctgtgaaggacctcgtggattcattggaacaggtaggtcagattgtggacgcaccggtgatgccggaattgccctcagaggcggactggtccatttttgtgaacgaggtggaggccgtggcagagggcatgccaacggaagtctcggaggttccggtgtggctgggcaggtgcaagagcgtggctgcactgggtcgggagatgagcatcacggcagtacagatgtcggagctgcagtatgacatctgggtgcaaggcatgatgcgggatatggctcgaagccaggcagacaggctggccgcaattcaacccgcggaccttaccaactatttggagatggctacccagatggatatgcggactacgaggatgctgctggggctcctcaacatattgcgcatccagaatgcggcgctcaggtacgagtatcttctaatgcccacggagctcacaacatggccactgggtatggataccgtgggtgacttgctcatcgcgcaggagaatgctgcactgataggattaatgcagctagggccctcatctgatttcacgagcaggcatgtggtgaaagacatacctgtgaacttgctgctcgatggcgaggattgggagtttgagattcctgtgcaagctggcatgtccagcttcccttccagctggtctcgcgtccgtattcggcacctggagatgcactttgtgaaggaggccagcggtattggtggtgagattatccaccagcctaccacccagactgggaccgtttacatccttctgcagggttccactatcttccatgaccgcagaagagaccaggtgttgccttttcaggccgctgctccgctcaactaccattacgcgtaccgcctcgacaccggcgactccactctcacaaacgaaccctctgaacagtttgccaacaagttcatgcagatgacacccttcacccgttggaggcttcgtctgtctgcgtccgcaaaagagaatgcaggattagcctttcccacggctacagcacttgactccactacccagattgtcatcactttccatgttacggccatcagacaaattgactggcggcacgacgaagag

SEQ ID NO: 312 - DNA, 2601 bp, synthetic construct
  misc_feature 1..2601: note = Synthetic
  source 1..2601: mol_type = other DNA
atggctctcgtggattacggcaagcttttcgaggatctgaaccagataagcatgggtgtactggatcgggtagagttttcagaggtgatggtgatccacaggatgtatgtgaggctagctgatctgaatgtggggcagctcgagggagccgagaaagtgaagcggttgtatgtgtttgcggacgtggtggagctaccagtcgtggaatggcggtggccgccgcaaataccaggatcggtgacggtgatcatattgtgtcgtcttcttcaatggccaactgatgggaggcagtcggacaccgagctccacctgacattcatgaagttgcatgccatacaacgagaggaaaatcggtgggagataaccgcagcagatggcatgaactggggagtttacatacacgcagaggaagtacaggttggcgtgctgacaatgtcatggtcttcggtacttagagtttcggcacttcgctctgttataacctccggctttcgcgccgttagtgtgtttgaggtaccgggaagtgtaaggtccacccttggagctactttaaggcccgatcacgccttatatagtacaactatgcaagccacacccaacgcatcgcatattagtgcttttaaccttcgcatagtttccccgtcggcatatcgtgtttgtcctctccaaaatgacacagatacctacttaggtattccagcagacgtggcggcagttcttccagtagacgtggtgactgatcctaacatcttgctgggcatgcagacaacggtacacattgcggagctagtcaaggcatgtcatccgtcacccgatgttgtgagcgctgtaggggagcacctgaactggctcaacaaactcttactcccacttaaggaatcgactcagttgcaaggaagcgagtcgtacaaggagtgccttgcactcttgggtcgtgttcacgctgcgatgaagatggtgagaattggcttagtagtgccccagctgcaatacagaatgtacggtagcctcatcaaccaaatggcccaagtagcacaaaactacgaccgagaattcaagcaattcaaattattcatcatccaaaatcaaatccttggcagctatttgctgcagcagaacagggcatttgctgagagggagctgcagatggagagctttcatgctgctgtcatttctcaaagaagggaggagttggacaatacattcgcaaagatggaccgattgagcgggcaaatggaggcagagagtagtgcaatggagcaagccaaaaaggaaatggacgaaggattgaggcagttccagaataggcaagttgcgaacgccctctttgccgttcttagcgctgtagctcagattgggcttgcattccttacggctggtgcaacggctcctggagctgtggcgtcggcggggcaagctgtgagcatagcaggtcaggcggcgcaaggtctgcgaagggtggtggaaattctagagcagctggaggctgtgatggaggttgtggctgctgtgaaggacctcgtggattcattggaacaggtaggtcagattgtggacgcaccggtgatgccggaattgccctcagaggcggactggtccatttttgtgaacgaggtggaggccgtggcagagggcatgccaacggaagtctcggaggttccggtgtggctggtcaagtgcaagtgcgtggctgcactgggtcgagagatgagcatcacggcagtacagatgtcggagctgcagtatgacatctgggtgcaaggcatgatgcgggatatggctcgaagccaggcagacaggctggccgcaattcaacccgcggaccttaccaactatttggagatggctacccagatggatatgcggactacgaggatgctgctggggctcctcaacatattgcgcatccagaatgcggcgctcaggtacgagtatcttctaatgcccacggagctcacaacatggccactgggtatggataccgtgggtgacttgctcatcgcgcaggagaatgctgcactgataggattaatgcagctagggccctcatctgatttcacgagcaggcatgtggtgaaagacatacctgtgaacttgctgctcgatggcgaggattgggagtttgagattcctgtgcaagctggcatgtccagcttcccttccagctggtctcgcgtccgtattcggcacctggagatgcactttgtgaaggaggccagcggtattggtggtgagattatccaccagcctaccacccagactgggaccgtttacatccttctgcagggttccactatcttccatgaccgcagaagagaccaggtgttgccttttcaggccgctgctccgctcaactaccattacgcgtaccgcctcgacaccggcgactccactctcacaaacgaaccctctgaacagtttgccaacaagttcatgcagatgacacccttcacccgttggaggcttcgtctgtctgcgtccgcaaaagagaatgcaggattagcctttcccacggctacagcacttgactccactacccagattgtcatcactttccatgttacggccatcagacaaattgactggcggcacgacgaagag

SEQ ID NO: 313 - DNA, 2601 bp, synthetic construct
  misc_feature 1..2601: note = Synthetic
  source 1..2601: mol_type = other DNA
atggctctcgtggattacggcaagcttttcgaggatctgaaccagataagcatgggtgtactggatcgggtagagttttcagaggtgatggtgatccacaggatgtatgtgaggctagctgatctgaatgtggggcagctcgagggagccgagaaagtgaagcggttgtatgtgtttgcggacgtggtggagctaccagtcgtggaatggcggtggccgccgcaaataccaggatcggtgacggtgatcatattgtgtcgtcttcttcaatggccaactgatgggaggcagtcggacaccgagctccacctgacattcatgaagttgcatgccatacaacgagaggaaaatcggtgggagataaccgcagcagatggcatgaactggggagtttacatacacgcagaggaagtacaggttggcgtgctgacaatgtcatggtcttcggtacttagagtttcggcacttcgctctgttataacctccggctttcgcgccgttagtgtgtttgaggtaccgggaagtgtaaggtccacccttggagctactttaaggcccgatcacgccttatatagtacaactatgcaagccacacccaacgcatcgcatattagtgcttttaaccttcgcatagtttccccgtcggcatatcgtgtttgtcctctccaaaatgacacagatacctacttaggtattccagcagacgtggcggcagttcttccagtagacgtggtgactgatcctaacatcttgctgggcatgcagacaacggtacacattgcggagctagtcaaggcatgtcatccgtcacccgatgttgtgagcgctgtaggggagcacctgaactggctcaacaaactcttactcccacttaaggaatcgactcagttgcaaggaagcgagtcgtacaaggagtgccttgcactcttgggtcgtgttcacgctgcgatgaagatggtgagaattggcttagtagtgccccagctgcaatacagaatgtacggtagcctcatcaaccaaatggcccaagtagcacaaaactacgaccgagaattcaagcaattcaaattattcatcatccaaaatcaaatccttggcagctatttgctgcagcagaacagggcatttgctgagagggagctgcagatggagagctttcatgctgctgtcatttctcaaagaagggaggagttggacaatacattcgcaaagatggaccgattgagcgggcaaatggaggcagagagtagtgcaatggagcaagccaaaaaggaaatggacgaaggattgaggcagttccagaataggcaagttgcgaacgccctctttgccgttcttagcgctgtagctcagattgggcttgcattccttacggctggtgcaacggctcctggagctgtggcgtcggcggggcaagctgtgagcatagcaggtcaggcggcgcaaggtctgcgaagggtggtggaaattctagagcagctggaggctgtgatggaggttgtgtctgctgtgaaggacctcgtggattcattggaacaggtaggtcagattgtggacgcaccggtgatgccggaattgccctcagaggcggactggtccatttttgtgaacgaggtggaggccgtggcagagggcatgccaacggaagtctcggaggttccggtgtggatggccaagtgcaagaatgtggctgcactgggtcgggagatgagcatcacggcagtacagatgtcggagctgcagtatgacatctgggtgcaaggcatgatgcgggatatggctcgaagccaggcagacaggctggccgcaattcaacccgcggaccttaccaactatttggagatggctacccagatggatatgcggactacgaggatgctgctggggctcctcaacatattgcgcatccagaatgcggcgctcaggtacgagtatcttctaatgcccacggagctcacaacatggccactgggtatggataccgtgggtgacttgctcatcgcgcaggagaatgctgcactgataggattaatgcagctagggccctcatctgatttcacgagcaggcatgtggtgaaagacatacctgtgaacttgctgctcgatggcgaggattgggagtttgagattcctgtgcaagctggcatgtccagcttcccttccagctggtctcgcgtccgtattcggcacctggagatgcactttgtgaaggaggccagcggtattggtggtgagattatccaccagcctaccacccagactgggaccgtttacatccttctgcagggttccactatcttccatgaccgcagaagagaccaggtgttgccttttcaggccgctgctccgctcaactaccattacgcgtaccgcctcgacaccggcgactccactctcacaaacgaaccctctgaacagtttgccaacaagttcatgcagatgacacccttcacccgttggaggcttcgtctgtctgcgtccgcaaaagagaatgcaggattagcctttcccacggctacagcacttgactccactacccagattgtcatcactttccatgttacggccatcagacaaattgactggcggcacgacgaagag

SEQ ID NO: 314 - DNA, 2601 bp, synthetic construct
  misc_feature 1..2601: note = Synthetic
  source 1..2601: mol_type = other DNA
atggctctcgtggattacggcaagcttttcgaggatctgaaccagataagcatgggtgtactggatcgggtagagttttcagaggtgatggtgatccacaggatgtatgtgaggctagctgatctgaatgtggggcagctcgagggagccgagaaagtgaagcggttgtatgtgtttgcggacgtggtggagctaccagtcgtggaatggcggtggccgccgcaaataccaggatcggtgacggtgatcatattgtgtcgtcttcttcaatggccaactgatgggaggcagtcggacaccgagctccacctgacattcatgaagttgcatgccatacaacgagaggaaaatcggtgggagataaccgcagcagatggcatgaactggggagtttacatacacgcagaggaagtacaggttggcgtgctgacaatgtcatggtcttcggtacttagagtttcggcacttcgctctgttataacctccggctttcgcgccgttagtgtgtttgaggtaccgggaagtgtaaggtccacccttggagctactttaaggcccgatcacgccttatatagtacaactatgcaagccacacccaacgcatcgcatattagtgcttttaaccttcgcatagtttccccgtcggcatatcgtgtttgtcctctccaaaatgacacagatacctacttaggtattccagcagacgtggcggcagttcttccagtagacgtggtgactgatcctaacatcttgctgggcatgcagacaacggtacacattgcggagctagtcaaggcatgtcatccgtcacccgatgttgtgagcgctgtaggggagcacctgaactggctcaacaaactcttactcccacttaaggaatcgactcagttgcaaggaagcgagtcgtacaaggagtgccttgcactcttgggtcgtgttcacgctgcgatgaagatggtgagaattggcttagtagtgccccagctgcaatacagaatgtacggtagcctcatcaaccaaatggcccaagtagcacaaaactacgaccgagaattcaagcaattcaaattattcatcatccaaaatcaaatccttggcagctatttgctgcagcagaacagggcatttgctgagagggagctgcagatggagagctttcatgctgctgtcatttctcaaagaagggaggagttggacaatacattcgcaaagatggaccgattgagcgggcaaatggaggcagagagtagtgcaatggagcaagccaaaaaggaaatggacgaaggattgaggcagttccagaataggcaagttgcgaacgccctctttgccgttcttagcgctgtagctcagattgggcttgcattccttacggctggtgcaacggctcctggagctgtggcgtcggcggggcaagctgtgagcatagcaggtcaggcggcgcaaggtctgcgaagggtggtggaaattctagagcagctggaggctgtgatggaggttgtggctgctgtgaaggacctcgtggattcattggaacaggtaggtcagattgtggacgcaccggtgatgccggaattgccctcagaggcggactggtccatttttgtgaacgaggtggaggccgtggcagagggcatgccaacggaagtctcggaggttccggtgtggatgggccggtgcaagtccgtggctgcactgggtcgggagatgagcatcacggcagtacagatgtcggagctgcagtatgacatctgggtgcaaggcatgatgcgggatatggctcgaagccaggcagacaggctggccgcaattcaacccgcggaccttaccaactatttggagatggctacccagatggatatgcggactacgaggatgctgctggggctcctcaacatattgcgcatccagaatgcggcgctcaggtacgagtatcttctaatgcccacggagctcacaacatggccactgggtatggataccgtgggtgacttgctcatcgcgcaggagaatgctgcactgataggattaatgcagctagggccctcatctgatttcacgagcaggcatgtggtgaaagacatacctgtgaacttgctgctcgatggcgaggattgggagtttgagattcctgtgcaagctggcatgtccagcttcccttccagctggtctcgcgtccgtattcggcacctggagatgcactttgtgaaggaggccagcggtattggtggtgagattatccaccagcctaccacccagactgggaccgtttacatccttctgcagggttccactatcttccatgaccgcagaagagaccaggtgttgccttttcaggccgctgctccgctcaactaccattacgcgtaccgcctcgacaccggcgactccactctcacaaacgaaccctctgaacagtttgccaacaagttcatgcagatgacacccttcacccgttggaggcttcgtctgtctgcgtccgcaaaagagaatgcaggattagcctttcccacggctacagcacttgactccactacccagattgtcatcactttccatgttacggccatcagacaaattgactggcggcacgacgaagag

SEQ ID NO: 315 - DNA, 2601 bp, synthetic construct
  misc_feature 1..2601: note = Synthetic
  source 1..2601: mol_type = other DNA
atggctctcgtggattacggcaagcttttcgaggatctgaaccagataagcatgggtgtactggatcgggtagagttttcagaggtgatggtgatccacaggatgtatgtgaggctagctgatctgaatgtggggcagctcgagggagccgagaaagtgaagcggttgtatgtgtttgcggacgtggtggagctaccagtcgtggaatggcggtggccgccgcaaataccaggatcggtgacggtgatcatattgtgtcgtcttcttcaatggccaactgatgggaggcagtcggacaccgagctccacctgacattcatgaagttgcatgccatacaacgagaggaaaatcggtgggagataaccgcagcagatggcatgaactggggagtttacatacacgcagaggaagtacaggttggcgtgctgacaatgtcatggtcttcggtacttagagtttcggcacttcgctctgttataacctccggctttcgcgccgttagtgtgtttgaggtaccgggaagtgtaaggtccacccttggagctactttaaggcccgatcacgccttatatagtacaactatgcaagccacacccaacgcatcgcatattagtgcttttaaccttcgcatagtttccccgtcggcatatcgtgtttgtcctctccaaaatgacacagatacctacttaggtattccagcagacgtggcggcagttcttccagtagacgtggtgactgatcctaacatcttgctgggcatgcagacaacggtacacattgcggagctagtcaaggcatgtcatccgtcacccgatgttgtgagcgctgtaggggagcacctgaactggctcaacaaactcttactcccacttaaggaatcgactcagttgcaaggaagcgagtcgtacaaggagtgccttgcactcttgggtcgtgttcacgctgcgatgaagatggtgagaattggcttagtagtgccccagctgcaatacagaatgtacggtagcctcatcaaccaaatggcccaagtagcacaaaactacgaccgagaattcaagcaattcaaattattcatcatccaaaatcaaatccttggcagctatttgctgcagcagaacagggcatttgctgagagggagctgcagatggagagctttcatgctgctgtcatttctcaaagaagggaggagttggacaatacattcgcaaagatggaccgattgagcgggcaaatggaggcagagagtagtgcaatggagcaagccaaaaaggaaatggacgaaggattgaggcagttccagaataggcaagttgcgaacgccctctttgccgttcttagcgctgtagctcagattgggcttgcattccttacggctggtgcaacggctcctggagctgtggcgtcggcggggcaagctgtgagcatagcaggtcaggcggcgcaaggtctgcgaagggtggtggaaattctagagcagctggaggctgtgatggaggttgtggctgctgtgaaggacctcgtggattcattggaacaggtaggtcagattgtggacgcaccggtgatgccggaattgccctcagaggcggactggtccatttttgtgaacgaggtggaggccgtggcagagggcatgccaacggaagtctcggaggttccggtgtggatggtcaagtgcaagaatgtggctgcactgggtcgggagatgagcatcacggcagtacagatgtcggagctgcagtatgacatctgggtgcaaggcatgatgcgggatatggctcgaagccaggcagacaggctggccgcaattcaacccgcggaccttaccaactatttggagatggctacccagatggatatgcggactacgaggatgctgctggggctcctcaacatattgcgcatccagaatgcggcgctcaggtacgagtatcttctaatgcccacggagctcacaacatggccactgggtatggataccgtgggtgacttgctcatcgcgcaggagaatgctgcactgataggattaatgcagctagggccctcatctgatttcacgagcaggcatgtggtgaaagacatacctgtgaacttgctgctcgatggcgaggattgggagtttgagattcctgtgcaagctggcatgtccagcttcccttccagctggtctcgcgtccgtattcggcacctggagatgcactttgtgaaggaggccagcggtattggtggtgagattatccaccagcctaccacccagactgggaccgtttacatccttctgcagggttccactatcttccatgaccgcagaagagaccaggtgttgccttttcaggccgctgctccgctcaactaccattacgcgtaccgcctcgacaccggcgactccactctcacaaacgaaccctctgaacagtttgccaacaagttcatgcagatgacacccttcacccgttggaggcttcgtctgtctgcgtccgcaaaagagaatgcaggattagcctttcccacggctacagcacttgactccactacccagattgtcatcactttccatgttacggccatcagacaaattgactggcggcacgacgaagag

SEQ ID NO: 316 - DNA, 2601 bp, synthetic construct
  misc_feature 1..2601: note = Synthetic
  source 1..2601: mol_type = other DNA
atggctctcgtggattacggcaagcttttcgaggatctgaaccagataagcatgggtgtactggatcgggtagagttttcagaggtgatggtgatccacaggatgtatgtgaggctagctgatctgaatgtggggcagctcgagggagccgagaaagtgaagcggttgtatgtgtttgcggacgtggtggagctaccagtcgtggaatggcggtggccgccgcaaataccaggatcggtgacggtgatcatattgtgtcgtcttcttcaatggccaactgatgggaggcagtcggacaccgagctccacctgacattcatgaagttgcatgccatacaacgagaggaaaatcggtgggagataaccgcagcagatggcatgaactggggagtttacatacacgcagaggaagtacaggttggcgtgctgacaatgtcatggtcttcggtacttagagtttcggcacttcgctctgttataacctccggctttcgcgccgttagtgtgtttgaggtaccgggaagtgtaaggtccacccttggagctactttaaggcccgatcacgccttatatagtacaactatgcaagccacacccaacgcatcgcatattagtgcttttaaccttcgcatagtttccccgtcggcatatcgtgtttgtcctctccaaaatgacacagatacctacttaggtattccagcagacgtggcggcagttcttccagtagacgtggtgactgatcctaacatcttgctgggcatgcagacaacggtacacattgcggagctagtcaaggcatgtcatccgtcacccgatgttgtgagcgctgtaggggagcacctgaactggctcaacaaactcttactcccacttaaggaatcgactcagttgcaaggaagcgagtcgtacaaggagtgccttgcactcttgggtcgtgttcacgctgcgatgaagatggtgagaattggcttagtagtgccccagctgcaatacagaatgtacggtagcctcatcaaccaaatggcccaagtagcacaaaactacgaccgagaattcaagcaattcaaattattcatcatccaaaatcaaatccttggcagctatttgctgcagcagaacagggcatttgctgagagggagctgcagatggagagctttcatgctgctgtcatttctcaaagaagggaggagttggacaatacattcgcaaagatggaccgattgagcgggcaaatggaggcagagagtagtgcaatggagcaagccaaaaaggaaatggacgaaggattgaggcagttccagaataggcaagttgcgaacgccctctttgccgttcttagcgctgtagctcagattgggcttgcattccttacggctggtgcaacggctcctggagctgtggcgtcggcggggcaagctgtgagcatagcaggtcaggcggcgcaaggtctgcgaagggtggtggaaattctagagcagctggaggctgtgatggaggttgtggctgctgtgaaggacctcgtggattcattggaacaggtaggtcagattgtggacgcaccggtgatgccggaattgccctcagaggcggactggtccatttttgtgaacgaggtggaggccgtggcagagggcatgccaacggaagtctcggaggttccggtgtggatggtcaagtgcaagagcgtggctgcactgggtcgggagatgagcatcacggcagtacagatgtcggagctgcagtatgacatctgggtgcaaggcatgatgcgggatatggctcgaagccaggcagacaggctggccgcaattcaacccgcggaccttaccaactatttggagatggctacccagatggatatgcggactacgaggatgctgctggggctcctcaacatattgcgcatccagaatgcggcgctcaggtacgagtatcttctaatgcccacggagctcacaacatggccactgggtatggataccgtgggtgacttgctcatcgcgcaggagaatgctgcactgataggattaatgcagctagggccctcatctgatttcacgagcaggcatgtggtgaaagacatacctgtgaacttgctgctcgatggcgaggattgggagtttgagattcctgtgcaagctggcatgtccagcttcccttccagctggtctcgcgtccgtattcggcacctggagatgcactttgtgaaggaggccagcggtattggtggtgagattatccaccagcctaccacccagactgggaccgtttacatccttctgcagggttccactatcttccatgaccgcagaagagaccaggtgttgccttttcaggccgctgctccgctcaactaccattacgcgtaccgcctcgacaccggcgactccactctcacaaacgaaccctctgaacagtttgccaacaagttcatgcagatgacacccttcacccgttggaggcttcgtctgtctgcgtccgcaaaagagaatgcaggattagcctttcccacggctacagcacttgactccactacccagattgtcatcactttccatgttacggccatcagacaaattgactggcggcacgacgaagag

SEQ ID NO: 317 - DNA, 2601 bp, synthetic construct
  misc_feature 1..2601: note = Synthetic
  source 1..2601: mol_type = other DNA
atggctctcgtggattacggcaagcttttcgaggatctgaaccagataagcatgggtgtactggatcgggtagagttttcagaggtgatggtgatccacaggatgtatgtgaggctagctgatctgaatgtggggcagctcgagggagccgagaaagtgaagcggttgtatgtgtttgcggacgtggtggagctaccagtcgtggaatggcggtggccgccgcaaataccaggatcggtgacggtgatcatattgtgtcgtcttcttcaatggccaactgatgggaggcagtcggacaccgagctccacctgacattcatgaagttgcatgccatacaacgagaggaaaatcggtgggagataaccgcagcagatggcatgaactggggagtttacatacacgcagaggaagtacaggttggcgtgctgacaatgtcatggtcttcggtacttagagtttcggcacttcgctctgttataacctccggctttcgcgccgttagtgtgtttgaggtaccgggaagtgtaaggtccacccttggagctactttaaggcccgatcacgccttatatagtacaactatgcaagccacacccaacgcatcgcatattagtgcttttaaccttcgcatagtttccccgtcggcatatcgtgtttgtcctctccaaaatgacacagatacctacttaggtattccagcagacgtggcggcagttcttccagtagacgtggtgactgatcctaacatcttgctgggcatgcagacaacggtacacattgcggagctagtcaaggcatgtcatccgtcacccgatgttgtgagcgctgtaggggagcacctgaactggctcaacaaactcttactcccacttaaggaatcgactcagttgcaaggaagcgagtcgtacaaggagtgccttgcactcttgggtcgtgttcacgctgcgatgaagatggtgagaattggcttagtagtgccccagctgcaatacagaatgtacggtagcctcatcaaccaaatggcccaagtagcacaaaactacgaccgagaattcaagcaattcaaattattcatcatccaaaatcaaatccttggcagctatttgctgcagcagaacagggcatttgctgagagggagctgcagatggagagctttcatgctgctgtcatttctcaaagaagggaggagttggacaatacattcgcaaagatggaccgattgagcgggcaaatggaggcagagagtagtgcaatggagcaagccaaaaaggaaatggacgaaggattgaggcagttccagaataggcaagttgcgaacgccctctttgccgttcttagcgctgtagctcagattgggcttgcattccttacggctggtgcaacggctcctggagctgtggcgtcggcggggcaagctgtgagcatagcaggtcaggcggcgcaaggtctgcgaagggtggtggaaattctagagcagctggaggctgtgatggaggttgtggctgctgtgaaggacctcgtggattcattggaacaggtaggtcagattgtggacgcaccggtgatgccggaattgccctcagaggcggactggtccatttttgtgaacgaggtggaggccgtggcagagggcatgccaacggaagtctcggaggttccggtgtggatggtcaggtgcaagaatgtggctgcactgggtcgggagatgagcatcacggcagtacagatgtcggagctgcagtatgacatctgggtgcaaggcatgatgcgggatatggctcgaagccaggcagacaggctggccgcaattcaacccgcggaccttaccaactatttggagatggctacccagatggatatgcggactacgaggatgctgctggggctcctcaacatattgcgcatccagaatgcggcgctcaggtacgagtatcttctaatgcccacggagctcacaacatggccactgggtatggataccgtgggtgacttgctcatcgcgcaggagaatgctgcactgataggattaatgcagctagggccctcatctgatttcacgagcaggcatgtggtgaaagacatacctgtgaacttgctgctcgatggcgaggattgggagtttgagattcctgtgcaagctggcatgtccagcttcccttccagctggtctcgcgtccgtattcggcacctggagatgcactttgtgaaggaggccagcggtattggtggtgagattatccaccagcctaccacccagactgggaccgtttacatccttctgcagggttccactatcttccatgaccgcagaagagaccaggtgttgccttttcaggccgctgctccgctcaactaccattacgcgtaccgcctcgacaccggcgactccactctcacaaacgaaccctctgaacagtttgccaacaagttcatgcagatgacacccttcacccgttggaggcttcgtctgtctgcgtccgcaaaagagaatgcaggattagcctttcccacggctacagcacttgactccactacccagattgtcatcactttccatgttacggccatcagacaaattgactggcggcacgacgaagag

SEQ ID NO: 318 - DNA, 2601 bp, synthetic construct
  misc_feature 1..2601: note = Synthetic
  source 1..2601: mol_type = other DNA
atggctctcgtggattacggcaagcttttcgaggatctgaaccagataagcatgggtgtactggatcgggtagagttttcagaggtgatggtgatccacaggatgtatgtgaggctagctgatctgaatgtggggcagctcgagggagccgagaaagtgaagcggttgtatgtgtttgcggacgtggtggagctaccagtcgtggaatggcggtggccgccgcaaataccaggatcggtgacggtgatcatattgtgtcgtcttcttcaatggccaactgatgggaggcagtcggacaccgagctccacctgacattcatgaagttgcatgccatacaacgagaggaaaatcggtgggagataaccgcagcagatggcatgaactggggagtttacatacacgcagaggaagtacaggttggcgtgctgacaatgtcatggtcttcggtacttagagtttcggcacttcgctctgttataacctccggctttcgcgccgttagtgtgtttgaggtaccgggaagtgtaaggtccacccttggagctactttaaggcccgatcacgccttatatagtacaactatgcaagccacacccaacgcatcgcatattagtgcttttaaccttcgcatagtttccccgtcggcatatcgtgtttgtcctctccaaaatgacacagatacctacttaggtattccagcagacgtggcggcagttcttccagtagacgtggtgactgatcctaacatcttgctgggcatgcagacaacggtacacattgcggagctagtcaaggcatgtcatccgtcacccgatgttgtgagcgctgtaggggagcacctgaactggctcaacaaactcttactcccacttaaggaatcgactcagttgcaaggaagcgagtcgtacaaggagtgccttgcactcttgggtcgtgttcacgctgcgatgaagatggtgagaattggcttagtagtgccccagctgcaatacagaatgtacggtagcctcatcaaccaaatggcccaagtagcacaaaactacgaccgagaattcaagcaattcaaattattcatcatccaaaatcaaatccttggcagctatttgctgcagcagaacagggcatttgctgagagggagctgcagatggagagctttcatgctgctgtcatttctcaaagaagggaggagttggacaatacattcgcaaagatggaccgattgagcgggcaaatggaggcagagagtagtgcaatggagcaagccaaaaaggaaatggacgaaggattgaggcagttccagaataggcaagttgcgaacgccctctttgccgttcttagcgctgtagctcagattgggcttgcattccttacggctggtgcaacggctcctggagctgtggcgtcggcggggcaagctgtgagcatagcaggtcaggcggcgcaaggtctgcgaagggtggtggaaattctagagcagctggaggctgtgatggaggttgtggctgctgtgaaggacctcgtggattcattggaacaggtaggtcagattgtggacgcaccggtgatgccggaattgccctcagaggcggactggtccatttttgtgaacgaggtggaggccgtggcagagggcatgccaacggaagtctcggaggttccggtgtggcaggccaggtgcaagcatgtggctgcactgggtcgggagatgagcatcacggcagtacagatgtcggagctgcagtatgacatctgggtgcaaggcatgatgcgggatatggctcgaagccaggcagacaggctggccgcaattcaacccgcggaccttaccaactatttggagatggctacccagatggatatgcggactacgaggatgctgctggggctcctcaacatattgcgcatccagaatgcggcgctcaggtacgagtatcttctaatgcccacggagctcacaacatggccactgggtatggataccgtgggtgacttgctcatcgcgcaggagaatgctgcactgataggattaatgcagctagggccctcatctgatttcacgagcaggcatgtggtgaaagacatacctgtgaacttgctgctcgatggcgaggattgggagtttgagattcctgtgcaagctggcatgtccagcttcccttccagctggtctcgcgtccgtattcggcacctggagatgcactttgtgaaggaggccagcggtattggtggtgagattatccaccagcctaccacccagactgggaccgtttacatccttctgcagggttccactatcttccatgaccgcagaagagaccaggtgttgccttttcaggccgctgctccgctcaactaccattacgcgtaccgcctcgacaccggcgactccactctcacaaacgaaccctctgaacagtttgccaacaagttcatgcagatgacacccttcacccgttggaggcttcgtctgtctgcgtccgcaaaagagaatgcaggattagcctttcccacggctacagcacttgactccactacccagattgtcatcactttccatgttacggccatcagacaaattgactggcggcacgacgaagag

SEQ ID NO: 319 - DNA, 2601 bp, synthetic construct
  misc_feature 1..2601: note = Synthetic
  source 1..2601: mol_type = other DNA
atggctctcgtggattacggcaagcttttcgaggatctgaaccagataagcatgggtgtactggatcgggtagagttttcagaggtgatggtgatccacaggatgtatgtgaggctagctgatctgaatgtggggcagctcgagggagccgagaaagtgaagcggttgtatgtgtttgcggacgtggtggagctaccagtcgtggaatggcggtggccgccgcaaataccaggatcggtgacggtgatcatattgtgtcgtcttcttcaatggccaactgatgggaggcagtcggacaccgagctccacctgacattcatgaagttgcatgccatacaacgagaggaaaatcggtgggagataaccgcagcagatggcatgaactggggagtttacatacacgcagaggaagtacaggttggcgtgctgacaatgtcatggtcttcggtacttagagtttcggcacttcgctctgttataacctccggctttcgcgccgttagtgtgtttgaggtaccgggaagtgtaaggtccacccttggagctactttaaggcccgatcacgccttatatagtacaactatgcaagccacacccaacgcatcgcatattagtgcttttaaccttcgcatagtttccccgtcggcatatcgtgtttgtcctctccaaaatgacacagatacctacttaggtattccagcagacgtggcggcagttcttccagtagacgtggtgactgatcctaacatcttgctgggcatgcagacaacggtacacattgcggagctagtcaaggcatgtcatccgtcacccgatgttgtgagcgctgtaggggagcacctgaactggctcaacaaactcttactcccacttaaggaatcgactcagttgcaaggaagcgagtcgtacaaggagtgccttgcactcttgggtcgtgttcacgctgcgatgaagatggtgagaattggcttagtagtgccccagctgcaatacagaatgtacggtagcctcatcaaccaaatggcccaagtagcacaaaactacgaccgagaattcaagcaattcaaattattcatcatccaaaatcaaatccttggcagctatttgctgcagcagaacagggcatttgctgagagggagctgcagatggagagctttcatgctgctgtcatttctcaaagaagggaggagttggacaatacattcgcaaagatggaccgattgagcgggcaaatggaggcagagagtagtgcaatggagcaagccaaaaaggaaatggacgaaggattgaggcagttccagaataggcaagttgcgaacgccctctttgccgttcttagcgctgtagctcagattgggcttgcattccttacggctggtgcaacggctcctggagctgtggcgtcggcggggcaagctgtgagcatagcaggtcaggcggcgcaaggtctgcgaagggtggtggaaattctagagcagctggaggctgtgatggaggttgtggctgctgtgaatgacctcgtggattcattggaacaggtaggtcagattgtggacgcaccggtgatgccggaattgccctcagaggcggactggtccatttttgtgaacgaggtggaggccgtggcagagggcatgccaacggaagtctcggaggttccggtgtggcaggccaggtgcaagaatgtggctgcactgggtcgggagatgagcatcacggcagtacagatgtcggagctgcagtatgacatctgggtgcaaggcatgatgcgggatatggctcgaagccaggcagacaggctggccgcaattcaacccgcggaccttaccaactatttggagatggctacccagatggatatgcggactacgaggatgctgctggggctcctcaacatattgcgcatccagaatgcggcgctcaggtacgagtatcttctaatgcccacggagctcacaacatggccactgggtatggataccgtgggtgacttgctcatcgcgcaggagaatgctgcactgataggattaatgcagctagggccctcatctgatttcacgagcaggcatgtggtgaaagacatacctgtgaacttgctgctcgatggcgaggattgggagtttgagattcctgtgcaagctggcatgtccagcttcccttccagctggtctcgcgtccgtattcggcacctggagatgcactttgtgaaggaggccagcggtattggtggtgagattatccaccagcctaccacccagactgggaccgtttacatccttctgcagggttccactatcttccatgaccgcagaagagaccaggtgttgccttttcaggccgctgctccgctcaactaccattacgcgtaccgcctcgacaccggcgactccactctcacaaacgaaccctctgaacagtttgccaacaagttcatgcagatgacacccttcacccgttggaggcttcgtctgtctgcgtccgcaaaagagaatgcaggattagcctttcccacggctacagcacttgactccactacccagattgtcatcactttccatgttacggccatcagacaaattgactggcggcacgacgaagag

SEQ ID NO: 320 - DNA, 2601 bp, synthetic construct
  misc_feature 1..2601: note = Synthetic
  source 1..2601: mol_type = other DNA
atggctctcgtggattacggcaagcttttcgaggatctgaaccagataagcatgggtgtactggatcgggtagagttttcagaggtgatggtgatccacaggatgtatgtgaggctagctgatctgaatgtggggcagctcgagggagccgagaaagtgaagcggttgtatgtgtttgcggacgtggtggagctaccagtcgtggaatggcggtggccgccgcaaataccaggatcggtgacggtgatcatattgtgtcgtcttcttcaatggccaactgatgggaggcagtcggacaccgagctccacctgacattcatgaagttgcatgccatacaacgagaggaaaatcggtgggagataaccgcagcagatggcatgaactggggagtttacatacacgcagaggaagtacaggttggcgtgctgacaatgtcatggtcttcggtacttagagtttcggcacttcgctctgttataacctccggctttcgcgccgttagtgtgtttgaggtaccgggaagtgtaaggtccacccttggagctactttaaggcccgatcacgccttatatagtacaactatgcaagccacacccaacgcatcgcatattagtgcttttaaccttcgcatagtttccccgtcggcatatcgtgtttgtcctctccaaaatgacacagatacctacttaggtattccagcagacgtggcggcagttcttccagtagacgtggtgactgatcctaacatcttgctgggcatgcagacaacggtacacattgcggagctagtcaaggcatgtcatccgtcacccgatgttgtgagcgctgtaggggagcacctgaactggctcaacaaactcttactcccacttaaggaatcgactcagttgcaaggaagcgagtcgtacaaggagtgccttgcactcttgggtcgtgttcacgctgcgatgaagatggtgagaattggcttagtagtgccccagctgcaatacagaatgtacggtagcctcatcaaccaaatggcccaagtagcacaaaactacgaccgagaattcaagcaattcaaattattcatcatccaaaatcaaatccttggcagctatttgctgcagcagaacagggcatttgctgagagggagctgcagatggagagctttcatgctgctgtcatttctcaaagaagggaggagttggacaatacattcgcaaagatggaccgattgagcgggcaaatggaggcagagagtagtgcaatggagcaagccaaaaaggaaatggacgaaggattgaggcagttccagaataggcaagttgcgaacgccctctttgccgttcttagcgctgtagctcagattgggcttgcattccttacggctggtgcaacggctcctggagctgtggcgtcggcggggcaagctgtgagcatagcaggtcaggcggcgcaaggtctgcgaagggtggtggaaattctagagcagctggaggctgtgatggaggttgtggctgctgtgaaggacctcgtggattcattggaacaggtaggtcagattgtggacgcaccggtgatgccggaattgccctcagaggcggactggtccatttttgtgaacgaggtggaggccgtggcagagggcatgccaacggaagtctcggaggttccggtgtggcagggcaggtgcaagaatgtggctgcactgggtcgggagatgagcatcacggcagtacagatgtcggagctgcagtatgacatctgggtgcaaggcatgatgcgggatatggctcgaagccaggcagacaggctggccgcaattcaacccgcggaccttaccaactatttggagatggctacccagatggatatgcggactacgaggatgctgctggggctcctcaacatattgcgcatccagaatgcggcgctcaggtacgagtatcttctaatgcccacggagctcacaacatggccactgggtatggataccgtgggtgacttgctcatcgcgcaggagaatgctgcactgataggattaatgcagctagggccctcatctgatttcacgagcaggcatgtggtgaaagacatacctgtgaacttgctgctcgatggcgaggattgggagtttgagattcctgtgcaagctggcatgtccagcttcccttccagctggtctcgcgtccgtattcggcacctggagatgcactttgtgaaggaggccagcggtattggtggtgagattatccaccagcctaccacccagactgggaccgtttacatccttctgcagggttccactatcttccatgaccgcagaagagaccaggtgttgccttttcaggccgctgctccgctcaactaccattacgcgtaccgcctcgacaccggcgactccactctcacaaacgaaccctctgaacagtttgccaacaagttcatgcagatgacacccttcacccgttggaggcttcgtctgtctgcgtccgcaaaagagaatgcaggattagcctttcccacggctacagcacttgactccactacccagattgtcatcactttccatgttacggccatcagacaaattgactggcggcacgacgaagag

SEQ ID NO: 321 - DNA, 2601 bp, synthetic construct
  misc_feature 1..2601: note = Synthetic
  source 1..2601: mol_type = other DNA
atggctctcgtggattacggcaagcttttcgaggatctgaaccagataagcatgggtgtactggatcgggtagagttttcagaggtgatggtgatccacaggatgtatgtgaggctagctgatctgaatgtggggcagctcgagggagccgagaaagtgaagcggttgtatgtgtttgcggacgtggtggagctaccagtcgtggaatggcggtggccgccgcaaataccaggatcggtgacggtgatcatattgtgtcgtcttcttcaatggccaactgatgggaggcagtcggacaccgagctccacctgacattcatgaagttgcatgccatacaacgagaggaaaatcggtgggagataaccgcagcagatggcatgaactggggagtttacatacacgcagaggaagtacaggttggcgtgctgacaatgtcatggtcttcggtacttagagtttcggcacttcgctctgttataacctccggctttcgcgccgttagtgtgtttgaggtaccgggaagtgtaaggtccacccttggagctactttaaggcccgatcacgccttatatagtacaactatgcaagccacacccaacgcatcgcatattagtgcttttaaccttcgcatagtttccccgtcggcatatcgtgtttgtcctctccaaaatgacacagatacctacttaggtattccagcagacgtggcggcagttcttccagtagacgtggtgactgatcctaacatcttgctgggcatgcagacaacggtacacattgcggagctagtcaaggcatgtcatccgtcacccgatgttgtgagcgctgtaggggagcacctgaactggctcaacaaactcttactcccacttaaggaatcgactcagttgcaaggaagcgagtcgtacaaggagtgccttgcactcttgggtcgtgttcacgctgcgatgaagatggtgagaattggcttagtagtgccccagctgcaatacagaatgtacggtagcctcatcaaccaaatggcccaagtagcacaaaactacgaccgagaattcaagcaattcaaattattcatcatccaaaatcaaatccttggcagctatttgctgcagcagaacagggcatttgctgagagggagctgcagatggagagctttcatgctgctgtcatttctcaaagaagggaggagttggacaatacattcgcaaagatggaccgattgagcgggcaaatggaggcagagagtagtgcaatggagcaagccaaaaaggaaatggacgaaggattgaggcagttccagaataggcaagttgcgaacgccctctttgccgttcttagcgctgtagctcagattgggcttgcattccttacggctggtgcaacggctcctggagctgtggcgtcggcggggcaagctgtgagcatagcaggtcaggcggcgcaaggtctgcgaagggtggtggaaattctagagcagctggaggctgtgatggaggttgtggctgctgtgaaggacctcgtggattcattggaacaggtaggtcagattgtggacgcaccggtgatgccggaattgccctcagaggcggactggtccatttttgtgaacgaggtggaggccgtggcagagggcatgccaacggaagtctcggaggttccggtgtggcaggtcaggtgcaagtccgtggctgcactgggtcgggagatgagcatcacggcagtacagatgtcggagctgcagtatgacatctgggtgcaaggcatgatgcgggatatggctcgaagccaggcagacaggctggccgcaattcaacccgcggaccttaccaactatttggagatggctacccagatggatatgcggactacgaggatgctgctggggctcctcaacatattgcgcatccagaatgcggcgctcaggtacgagtatcttctaatgcccacggagctcacaacatggccactgggtatggataccgtgggtgacttgctcatcgcgcaggagaatgctgcactgataggattaatgcagctagggccctcatctgatttcacgagcaggcatgtggtgaaagacatacctgtgaacttgctgctcgatggcgaggattgggagtttgagattcctgtgcaagctggcatgtccagcttcccttccagctggtctcgcgtccgtattcggcacctggagatgcactttgtgaaggaggccagcggtattggtggtgagattatccaccagcctaccacccagactgggaccgtttacatccttctgcagggttccactatcttccatgaccgcagaagagaccaggtgttgccttttcaggccgctgctccgctcaactaccattacgcgtaccgcctcgacaccggcgactccactctcacaaacgaaccctctgaacagtttgccaacaagttcatgcagatgacacccttcacccgttggaggcttcgtctgtctgcgtccgcaaaagagaatgcaggattagcctttcccacggctacagcacttgactccactacccagattgtcatcactttccatgttacggccatcagacaaattgactggcggcacgacgaagag

SEQ ID NO: 322 - DNA, 2601 bp, synthetic construct
  misc_feature 1..2601: note = Synthetic
  source 1..2601: mol_type = other DNA
atggctctcgtggattacggcaagcttttcgaggatctgaaccagataagcatgggtgtactggatcgggtagagttttcagaggtgatggtgatccacaggatgtatgtgaggctagctgatctgaatgtggggcagctcgagggagccgagaaagtgaagcggttgtatgtgtttgcggacgtggtggagctaccagtcgtggaatggcggtggccgccgcaaataccaggatcggtgacggtgatcatattgtgtcgtcttcttcaatggccaactgatgggaggcagtcggacaccgagctccacctgacattcatgaagttgcatgccatacaacgagaggaaaatcggtgggagataaccgcagcagatggcatgaactggggagtttacatacacgcagaggaagtacaggttggcgtgctgacaatgtcatggtcttcggtacttagagtttcggcacttcgctctgttataacctccggctttcgcgccgttagtgtgtttgaggtaccgggaagtgtaaggtccacccttggagctactttaaggcccgatcacgccttatatagtacaactatgcaagccacacccaacgcatcgcatattagtgcttttaaccttcgcatagtttccccgtcggcatatcgtgtttgtcctctccaaaatgacacagatacctacttaggtattccagcagacgtggcggcagttcttccagtagacgtggtgactgatcctaacatcttgctgggcatgcagacaacggtacacattgcggagctagtcaaggcatgtcatccgtcacccgatgttgtgagcgctgtaggggagcacctgaactggctcaacaaactcttactcccacttaaggaatcgactcagttgcaaggaagcgagtcgtacaaggagtgccttgcactcttgggtcgtgttcacgctgcgatgaagatggtgagaattggcttagtagtgccccagctgcaatacagaatgtacggtagcctcatcaaccaaatggcccaagtagcacaaaactacgaccgagaattcaagcaattcaaattattcatcatccaaaatcaaatccttggcagctatttgctgcagcagaacagggcatttgctgagagggagctgcagatggagagctttcatgctgctgtcatttctcaaagaagggaggagttggacaatacattcgcaaagatggaccgattgagcgggcaaatggaggcagagagtagtgcaatggagcaagccaaaaaggaaatggacgaaggattgaggcagttccagaataggcaagttgcgaacgccctctttgccgttcttagcgctgtagctcagattgggcttgcattccttacggctggtgcaacggctcctggagctgtggcgtcggcggggcaagctgtgagcatagcaggtcaggcggcgcaaggtctgcgaagggtggtggaaattctagagcagctggaggctgtgatggaggttgtggctgctgtgaaggacctcgtggattcattggaacaggtaggtcagattgtggacgcaccggtgatgccggaattgccctcagaggcggactggtccatttttgtgaacgaggtggaggccgtggcagagggcatgccaacggaagtctcggaggttccggtgtggagggccaggtgcaagaatgtggctgcactgggtcgggagatgagcatcgcggcagtacagatgtcggagctgcagtatgacatctgggtgcaaggcatgatgcgggatatggctcgaagccaggcagacaggctggccgcaattcaacccgcggaccttaccaactatttggagatggctacccagatggatatgcggactacgaggatgctgctggggctcctcaacatattgcgcatccagaatgcggcgctcaggtacgagtatcttctaatgcccacggagctcacaacatggccactgggtatggataccgtgggtgacttgctcatcgcgcaggagaatgctgcactgataggattaatgcagctagggccctcatctgatttcacgagcaggcatgtggtgaaagacatacctgtgaacttgctgctcgatggcgaggattgggagtttgagattcctgtgcaagctggcatgtccagcttcccttccagctggtctcgcgtccgtattcggcacctggagatgcactttgtgaaggaggccagcggtattggtggtgagattatccaccagcctaccacccagactgggaccgtttacatccttctgcagggttccactatcttccatgaccgcagaagagaccaggtgttgccttttcaggccgctgctccgctcaactaccattacgcgtaccgcctcgacaccggcgactccactctcacaaacgaaccctctgaacagtttgccaacaagttcatgcagatgacacccttcacccgttggaggcttcgtctgtctgcgtccgcaaaagagaatgcaggattagcctttcccacggctacagcacttgactccactacccagattgtcatcactttccatgttacggccatcagacaaattgactggcggcacgacgaagag

SEQ ID NO: 323 - DNA, 2601 bp, synthetic construct
  misc_feature 1..2601: note = Synthetic
  source 1..2601: mol_type = other DNA
atggctctcgtggattacggcaagcttttcgaggatctgaaccagataagcatgggtgtactggatcgggtagagttttcagaggtgatggtgatccacaggatgtatgtgaggctagctgatctgaatgtggggcagctcgagggagccgagaaagtgaagcggttgtatgtgtttgcggacgtggtggagctaccagtcgtggaatggcggtggccgccgcaaataccaggatcggtgacggtgatcatattgtgtcgtcttcttcaatggccaactgatgggaggcagtcggacaccgagctccacctgacattcatgaagttgcatgccatacaacgagaggaaaatcggtgggagataaccgcagcagatggcatgaactggggagtttacatacacgcagaggaagtacaggttggcgtgctgacaatgtcatggtcttcggtacttagagtttcggcacttcgctctgttataacctccggctttcgcgccgttagtgtgtttgaggtaccgggaagtgtaaggtccacccttggagctactttaaggcccgatcacgccttatatagtacaactatgcaagccacacccaacgcatcgcatattagtgcttttaaccttcgcatagtttccccgtcggcatatcgtgtttgtcctctccaaaatgacacagatacctacttaggtattccagcagacgtggcggcagttcttccagtagacgtggtgactgatcctaacatcttgctgggcatgcagacaacggtacacattgcggagctagtcaaggcatgtcatccgtcacccgatgttgtgagcgctgtaggggagcacctgaactggctcaacaaactcttactcccacttaaggaatcgactcagttgcaaggaagcgagtcgtacaaggagtgccttgcactcttgggtcgtgttcacgctgcgatgaagatggtgagaattggcttagtagtgccccagctgcaatacagaatgtacggtagcctcatcaaccaaatggcccaagtagcacaaaactacgaccgagaattcaagcaattcaaattattcatcatccaaaatcaaatccttggcagctatttgctgcagcagaacagggcatttgctgagagggagctgcagatggagagctttcatgctgctgtcatttctcaaagaagggaggagttggacaatacattcgcaaagatggaccgattgagcgggcaaatggaggcagagagtagtgcaatggagcaagccaaaaaggaaatggacgaaggattgaggcagttccagaataggcaagttgcgaacgccctctttgccgttcttagcgctgtagctcagattgggcttgcattccttacggctggtgcaacggctcctggagctgtggcgtcggcggggcaagctgtgagcatagcaggtcaggcggcgcaaggtctgcgaagggtggtggaaattctagagcagctggaggctgtgatggaggttgtggctgctgtgaaggacctcgtggattcattggaacaggtaggtcagattgtggacgcaccggtgatgccggaattgccctcagaggcggactggtccatttttgtgaacgaggtggaggccgtggcagagggcatgccaacggaagtctcggaggttccggtgtggaggggcaagtgcaagagcgtggctgcactgggtcgggagatgagcatcacggcagtacagatgtcggagctgcagtatgacatctgggtgcaaggcatgatgcgggatatggctcgaagccaggcagacaggctggccgcaattcaacccgcggaccttaccaactatttggagatggctacccagatggatatgcggactacgaggatgctgctggggctcctcaacatattgcgcatccagaatgcggcgctcaggtacgagtatcttctaatgcccacggagctcacaacatggccactgggtatggataccgtgggtgacttgctcatcgcgcaggagaatgctgcactgataggattaatgcagctagggccctcatctgatttcacgagcaggcatgtggtgaaagacatacctgtgaacttgctgctcgatggcgaggattgggagtttgagattcctgtgcaagctggcatgtccagcttcccttccagctggtctcgcgtccgtattcggcacctggagatgcactttgtgaaggaggccagcggtattggtggtgagattatccaccagcctaccacccagactgggaccgtttacatccttctgcagggttccactatcttccatgaccgcagaagagaccaggtgttgccttttcaggccgctgctccgctcaactaccattacgcgtaccgcctcgacaccggcgactccactctcacaaacgaaccctctgaacagtttgccaacaagttcatgcagatgacacccttcacccgttggaggcttcgtctgtctgcgtccgcaaaagagaatgcaggattagcctttcccacggctacagcacttgactccactacccagattgtcatcactttccatgttacggccatcagacaaattgactggcggcacgacgaagag

SEQ ID NO: 324 - DNA, 2601 bp, synthetic construct
  misc_feature 1..2601: note = Synthetic
  source 1..2601: mol_type = other DNA
atggctctcgtggattacggcaagcttttcgaggatctgaaccagataagcatgggtgtactggatcgggtagagttttcagaggtgatggtgatccacaggatgtatgtgaggctagctgatctgaatgtggggcagctcgagggagccgagaaagtgaagcggttgtatgtgtttgcggacgtggtggagctaccagtcgtggaatggcggtggccgccgcaaataccaggatcggtgacggtgatcatattgtgtcgtcttcttcaatggccaactgatgggaggcagtcggacaccgagctccacctgacattcatgaagttgcatgccatacaacgagaggaaaatcggtgggagataaccgcagcagatggcatgaactggggagtttacatacacgcagaggaagtacaggttggcgtgctgacaatgtcatggtcttcggtacttagagtttcggcacttcgctctgttataacctccggctttcgcgccgttagtgtgtttgaggtaccgggaagtgtaaggtccacccttggagctactttaaggcccgatcacgccttatatagtacaactatgcaagccacacccaacgcatcgcatattagtgcttttaaccttcgcatagtttccccgtcggcatatcgtgtttgtcctctccaaaatgacacagatacctacttaggtattccagcagacgtggcggcagttcttccagtagacgtggtgactgatcctaacatcttgctgggcatgcagacaacggtacacattgcggagctagtcaaggcatgtcatccgtcacccgatgttgtgagcgctgtaggggagcacctgaactggctcaacaaactcttactcccacttaaggaatcgactcagttgcaaggaagcgagtcgtacaaggagtgccttgcactcttgggtcgtgttcacgctgcgatgaagatggtgagaattggcttagtagtgccccagctgcaatacagaatgtacggtagcctcatcaaccaaatggcccaagtagcacaaaactacgaccgagaattcaagcaattcaaattattcatcatccaaaatcaaatccttggcagctatttgctgcagcagaacagggcatttgctgagagggagctgcagatggagagctttcatgctgctgtcatttctcaaagaagggaggagttggacaatacattcgcaaagatggaccgattgagcgggcaaatggaggcagagagtagtgcaatggagcaagccaaaaaggaaatggacgaaggattgaggcagttccagaataggcaagttgcgaacgccctctttgccgttcttagcgctgtagctcagattgggcttgcattccttacggctggtgcaacggctcctggagctgtggcgtcggcggggcaagctgtgagcatagcaggtcaggcggcgcaaggtctgcgaagggtggtggaaattctagagcagctggaggctgtgatggaggttgtggctgctgtgaaggacctcgtggattcattggaacaggtaggtcagattgtggacgcaccggtgatgccggaattgccctcagaggcggactggtccatttttgtgaacgaggtggaggccgtggcagagggcatgccaacggaagtctcggaggttccggtgtggaggggcaggtgcaagaccgtggctgcactgggtcgggagatgagcatcacggcagtacagatgtcggagctgcagtatgacatctgggtgcaaggcatgatgcgggatatggctcgaagccaggcagacaggctggccgcaattcaacccgcggaccttaccaactatttggagatggctacccagatggatatgcggactacgaggatgctgctggggctcctcaacatattgcgcatccagaatgcggcgctcaggtacgagtatcttctaatgcccacggagctcacaacatggccactgggtatggataccgtgggtgacttgctcatcgcgcaggagaatgctgcactgataggattaatgcagctagggccctcatctgatttcacgagcaggcatgtggtgaaagacatacctgtgaacttgctgctcgatggcgaggattgggagtttgagattcctgtgcaagctggcatgtccagcttcccttccagctggtctcgcgtccgtattcggcacctggagatgcactttgtgaaggaggccagcggtattggtggtgagattatccaccagcctaccacccagactgggaccgtttacatccttctgcagggttccactatcttccatgaccgcagaagagaccaggtgttgccttttcaggccgctgctccgctcaactaccattacgcgtaccgcctcgacaccggcgactccactctcacaaacgaaccctctgaacagtttgccaacaagttcatgcagatgacacccttcacccgttggaggcttcgtctgtctgcgtccgcaaaagagaatgcaggattagcctttcccacggctacagcacttgactccactacccagattgtcatcactttccatgttacggccatcagacaaattgactggcggcacgacgaagag

SEQ ID NO: 325 - DNA, 2601 bp, synthetic construct
  misc_feature 1..2601: note = Synthetic
  source 1..2601: mol_type = other DNA
atggctctcgtggattacggcaagcttttcgaggatctgaaccagataagcatgggtgtactggatcgggtagagttttcagaggtgatggtgatccacaggatgtatgtgaggctagctgatctgaatgtggggcagctcgagggagccgagaaagtgaagcggttgtatgtgtttgcggacgtggtggagctaccagtcgtggaatggcggtggccgccgcaaataccaggatcggtgacggtgatcatattgtgtcgtcttcttcaatggccaactgatgggaggcagtcggacaccgagctccacctgacattcatgaagttgcatgccatacaacgagaggaaaatcggtgggagataaccgcagcagatggcatgaactggggagtttacatacacgcagaggaagtacaggttggcgtgctgacaatgtcatggtcttcggtacttagagtttcggcacttcgctctgttataacctccggctttcgcgccgttagtgtgtttgaggtaccgggaagtgtaaggtccacccttggagctactttaaggcccgatcacgccttatatagtacaactatgcaagccacacccaacgcatcgcatattagtgcttttaaccttcgcatagtttccccgtcggcatatcgtgtttgtcctctccaaaatgacacagatacctacttaggtattccagcagacgtggcggcagttcttccagtagacgtggtgactgatcctaacatcttgctgggcatgcagacaacggtacacattgcggagctagtcaaggcatgtcatccgtcacccgatgttgtgagcgctgtaggggagcacctgaactggctcaacaaactcttactcccacttaaggaatcgactcagttgcaaggaagcgagtcgtacaaggagtgccttgcactcttgggtcgtgttcacgctgcgatgaagatggtgagaattggcttagtagtgccccagctgcaatacagaatgtacggtagcctcatcaaccaaatggcccaagtagcacaaaactacgaccgagaattcaagcaattcaaattattcatcatccaaaatcaaatccttggcagctatttgctgcagcagaacagggcatttgctgagagggagctgcagatggagagctttcatgctgctgtcatttctcaaagaagggaggagttggacaatacattcgcaaagatggaccgattgagcgggcaaatggaggcagagagtagtgcaatggagcaagccaaaaaggaaatggacgaaggattgaggcagttccagaataggcaagttgcgaacgccctctttgccgttcttagcgctgtagctcagattgggcttgcattccttacggctggtgcaacggctcctggagctgtggcgtcggcggggcaagctgtgagcatagcaggtcaggcggcgcaaggtctgcgaagggtggtggaaattctagagcagctggaggctgtgatggaggttgtggctgctgtgaaggacctcgtggattcattggaacaggtaggtcagattgtggacgcaccggtgatgccggaattgccctcagaggcggactggtccatttttgtgaacgaggtggaggccgtggcagagggcatgccaacggaagtctcggaggttccggtgtggagcgccaggtgcaagagcgtggctgcactgggtcgggagatgagcatcacggcagtacagatgtcggagctgcagtatgacatctgggtgcaaggcatgatgcgggatatggctcgaagccaggcagacaggctggccgcaattcaacccgcggaccttaccaactatttggagatggctacccagatggatatgcggactacgaggatgctgctggggctcctcaacatattgcgcatccagaatgcggcgctcaggtacgagtatcttctaatgcccacggagctcacaacatggccactgggtatggataccgtgggtgacttgctcatcgcgcaggagaatgctgcactgataggattaatgcagctagggccctcatctgatttcacgagcaggcatgtggtgaaagacatacctgtgaacttgctgctcgatggcgaggattgggagtttgagattcctgtgcaagctggcatgtccagcttcccttccagctggtctcgcgtccgtattcggcacctggagatgcactttgtgaaggaggccagcggtattggtggtgagattatccaccagcctaccacccagactgggaccgtttacatccttctgcagggttccactatcttccatgaccgcagaagagaccaggtgttgccttttcaggccgctgctccgctcaactaccattacgcgtaccgcctcgacaccggcgactccactctcacaaacgaaccctctgaacagtttgccaacaagttcatgcagatgacacccttcacccgttggaggcttcgtctgtctgcgtccgcaaaagagaatgcaggattagcctttcccacggctacagcacttgactccactacccagattgtcatcactttccatgttacggccatcagacaaattgactggcggcacgacgaagag

SEQ ID NO: 326 - DNA, 2601 bp, synthetic construct
  misc_feature 1..2601: note = Synthetic
  source 1..2601: mol_type = other DNA
atggctctcgtggattacggcaagcttttcgaggatctgaaccagataagcatgggtgtactggatcgggtagagttttcagaggtgatggtgatccacaggatgtatgtgaggctagctgatctgaatgtggggcagctcgagggagccgagaaagtgaagcggttgtatgtgtttgcggacgtggtggagctaccagtcgtggaatggcggtggccgccgcaaataccaggatcggtgacggtgatcatattgtgtcgtcttcttcaatggccaactgatgggaggcagtcggacaccgagctccacctgacattcatgaagttgcatgccatacaacgagaggaaaatcggtgggagataaccgcagcagatggcatgaactggggagtttacatacacgcagaggaagtacaggttggcgtgctgacaatgtcatggtcttcggtacttagagtttcggcacttcgctctgttataacctccggctttcgcgccgttagtgtgtttgaggtaccgggaagtgtaaggtccacccttggagctactttaaggcccgatcacgccttatatagtacaactatgcaagccacacccaacgcatcgcatattagtgcttttaaccttcgcatagtttccccgtcggcatatcgtgtttgtcctctccaaaatgacacagatacctacttaggtattccagcagacgtggcggcagttcttccagtagacgtggtgactgatcctaacatcttgctgggcatgcagacaacggtacacattgcggagctagtcaaggcatgtcatccgtcacccgatgttgtgagcgctgtaggggagcacctgaactggctcaacaaactcttactcccacttaaggaatcgactcagttgcaaggaagcgagtcgtacaaggagtgccttgcactcttgggtcgtgttcacgctgcgatgaagatggtgagaattggcttagtagtgccccagctgcaatacagaatgtacggtagcctcatcaaccaaatggcccaagtagcacaaaactacgaccgagaattcaagcaattcaaattattcatcatccaaaatcaaatccttggcagctatttgctgcagcagaacagggcatttgctgagagggagctgcagatggagagctttcatgctgctgtcatttctcaaagaagggaggagttggacaatacattcgcaaagatggaccgattgagcgggcaaatggaggcagagagtagtgcaatggagcaagccaaaaaggaaatggacgaaggattgaggcagttccagaataggcaagttgcgaacgccctctttgccgttcttagcgctgtagctcagattgggcttgcattccttacggctggtgcaacggctcctggagctgtggcgtcggcggggcaagctgtgagcatagcaggtcaggcggcgcaaggtctgcgaagggtggtggaaattctagagcagctggaggctgtgatggaggttgtggctgctgtgaaggacctcgtggattcattggaacaggtaggtcagattgtggacgcaccggtgatgccggaattgccctcagaggcggactggtccatttttgtgaacgaggtggaggccgtggcagagggcatgccaacggaagtctcggaggttccggtgtggagcgtcaagtgcaagcatgtggctgcactgggtcgggagatgagcatcacggcagtacagatgtcggagctgcagtatgacatctgggtgcaaggcatgatgcgggatatggctcgaagccaggcagacaggctggccgcaattcaacccgcggaccttaccaactatttggagatggctacccagatggatatgcggactacgaggatgctgctggggctcctcaacatattgcgcatccagaatgcggcgctcaggtacgagtatcttctaatgcccacggagctcacaacatggccactgggtatggataccgtgggtgacttgctcatcgcgcaggagaatgctgcactgataggattaatgcagctagggccctcatctgatttcacgagcaggcatgtggtgaaagacatacctgtgaacttgctgctcgatggcgaggattgggagtttgagattcctgtgcaagctggcatgtccagcttcccttccagctggtctcgcgtccgtattcggcacctggagatgcactttgtgaaggaggccagcggtattggtggtgagattatccaccagcctaccacccagactgggaccgtttacatccttctgcagggttccactatcttccatgaccgcagaagagaccaggtgttgccttttcaggccgctgctccgctcaactaccattacgcgtaccgcctcgacaccggcgactccactctcacaaacgaaccctctgaacagtttgccaacaagttcatgcagatgacacccttcacccgttggaggcttcgtctgtctgcgtccgcaaaagagaatgcaggattagcctttcccacggctacagcacttgactccactacccagattgtcatcactttccatgttacggccatcagacaaattgactggcggcacgacgaagag

SEQ ID NO: 327 - DNA, 2601 bp, synthetic construct
  misc_feature 1..2601: note = Synthetic
  source 1..2601: mol_type = other DNA
atggctctcgtggattacggcaagcttttcgaggatctgaaccagataagcatgggtgtactggatcgggtagagttttcagaggtgatggtgatccacaggatgtatgtgaggctagctgatctgaatgtggggcagctcgagggagccgagaaagtgaagcggttgtatgtgtttgcggacgtggtggagctaccagtcgtggaatggcggtggccgccgcaaataccaggatcggtgacggtgatcatattgtgtcgtcttcttcaatggccaactgatgggaggcagtcggacaccgagctccacctgacattcatgaagttgcatgccatacaacgagaggaaaatcggtgggagataaccgcagcagatggcatgaactggggagtttacatacacgcagaggaagtacaggttggcgtgctgacaatgtcatggtcttcggtacttagagtttcggcacttcgctctgttataacctccggctttcgcgccgttagtgtgtttgaggtaccgggaagtgtaaggtccacccttggagctactttaaggcccgatcacgccttatatagtacaactatgcaagccacacccaacgcatcgcatattagtgcttttaaccttcgcatagtttccccgtcggcatatcgtgtttgtcctctccaaaatgacacagatacctacttaggtattccagcagacgtggcggcagttcttccagtagacgtggtgactgatcctaacatcttgctgggcatgcagacaacggtacacattgcggagctagtcaaggcatgtcatccgtcacccgatgttgtgagcgctgtaggggagcacctgaactggctcaacaaactcttactcccacttaaggaatcgactcagttgcaaggaagcgagtcgtacaaggagtgccttgcactcttgggtcgtgttcacgctgcgatgaagatggtgagaattggcttagtagtgccccagctgcaatacagaatgtacggtagcctcatcaaccaaatggcccaagtagcacaaaactacgaccgagaattcaagcaattcaaattattcatcatccaaaatcaaatccttggcagctatttgctgcagcagaacagggcatttgctgagagggagctgcagatggagagctttcatgctgctgtcatttctcaaagaagggaggagttggacaatacattcgcaaagatggaccgattgagcgggcaaatggaggcagagagtagtgcaatggagcaagccaaaaaggaaatggacgaaggattgaggcagttccagaataggcaagttgcgaacgccctctttgccgttcttagcgctgtagctcagattgggcttgcattccttacggctggtgcaacggctcctggagctgtggcgtcggcggggcaagctgtgagcatagcaggtcaggcggcgcaaggtctgcgaagggtggtggaaattctagagcagctggaggctgtgatggaggttgtggctgctgtgaaggacctcgtggattcattggaacaggtaggtcagattgtggacgcaccggtgatgccggaattgccctcagaggcggactggtccatttttgtgaacgaggtggaggccgtggcagagggcatgccaacggaagtctcggaggttccggtgtggacgggccggtgcaagaccgtggctgcactgggtcgggagatgagcatcacggcagtacagatgtcggagctgcagtatgacatctgggtgcaaggcatgatgcgggatatggctcgaagccaggcagacaggctggccgcaattcaacccgcggaccttaccaactatttggagatggctacccagatggatatgcggactacgaggatgctgctggggctcctcaacatattgcgcatccagaatgcggcgctcaggtacgagtatcttctaatgcccacggagctcacaacatggccactgggtatggataccgtgggtgacttgctcatcgcgcaggagaatgctgcactgataggattaatgcagctagggccctcatctgatttcacgagcaggcatgtggtgaaagacatacctgtgaacttgctgctcgatggcgaggattgggagtttgagattcctgtgcaagctggcatgtccagcttcccttccagctggtctcgcgtccgtattcggcacctggagatgcactttgtgaaggaggccagcggtattggtggtgagattatccaccagcctaccacccagactgggaccgtttacatccttctgcagggttccactatcttccatgaccgcagaagagaccaggtgttgccttttcaggccgctgctccgctcaactaccattacgcgtaccgcctcgacaccggcgactccactctcacaaacgaaccctctgaacagtttgccaacaagttcatgcagatgacacccttcacccgttggaggcttcgtctgtctgcgtccgcaaaagagaatgcaggattagcctttcccacggctacagcacttgactccactacccagattgtcatcactttccatgttacggccatcagacaaattgactggcggcacgacgaagag

SEQ ID NO: 328 - DNA, 2601 bp, synthetic construct
  misc_feature 1..2601: note = Synthetic
  source 1..2601: mol_type = other DNA
atggctctcgtggattacggcaagcttttcgaggatctgaaccagataagcatgggtgtactggatcgggtagagttttcagaggtgatggtgatccacaggatgtatgtgaggctagctgatctgaatgtggggcagctcgagggagccgagaaagtgaagcggttgtatgtgtttgcggacgtggtggagctaccagtcgtggaatggcggtggccgccgcaaataccaggatcggtgacggtgatcatattgtgtcgtcttcttcaatggccaactgatgggaggcagtcggacaccgagctccacctgacattcatgaagttgcatgccatacaacgagaggaaaatcggtgggagataaccgcagcagatggcatgaactggggagtttacatacacgcagaggaagtacaggttggcgtgctgacaatgtcatggtcttcggtacttagagtttcggcacttcgctctgttataacctccggctttcgcgccgttagtgtgtttgaggtaccgggaagtgtaaggtccacccttggagctactttaaggcccgatcacgccttatatagtacaactatgcaagccacacccaacgcatcgcatattagtgcttttaaccttcgcatagtttccccgtcggcatatcgtgtttgtcctctccaaaatgacacagatacctacttaggtattccagcagacgtggcggcagttcttccagtagacgtggtgactgatcctaacatcttgctgggcatgcagacaacggtacacattgcggagctagtcaaggcatgtcatccgtcacccgatgttgtgagcgctgtaggggagcacctgaactggctcaacaaactcttactcccacttaaggaatcgactcagttgcaaggaagcgagtcgtacaaggagtgccttgcactcttgggtcgtgttcacgctgcgatgaagatggtgagaattggcttagtagtgccccagctgcaatacagaatgtacggtagcctcatcaaccaaatggcccaagtagcacaaaactacgaccgagaattcaagcaattcaaattattcatcatccaaaatcaaatccttggcagctatttgctgcagcagaacagggcatttgctgagagggagctgcagatggagagctttcatgctgctgtcatttctcaaagaagggaggagttggacaatacattcgcaaagatggaccgattgagcgggcaaatggaggcagagagtagtgcaatggagcaagccaaaaaggaaatggacgaaggattgaggcagttccagaataggcaagttgcgaacgccctctttgccgttcttagcgctgtagctcagattgggcttgcattccttacggctggtgcaacggctcctggagctgtggcgtcggcggggcaagctgtgagcatagcaggtcaggcggcgcaaggtctgcgaagggtggtggaaattctagagcagctggaggctgtgatggaggttgtggctgctgtgaaggacctcgtggattcattggaacaggtaggtcagattgtggacgcaccggtgatgccggaattgccctcagaggcggactggtccatttttgtgaacgaggtggaggccgtggcagagggcatgccaacggaagtctcggaggttccggtgtggaccggcaggtgcaaccatgtggctgcactgggtcaggagatgagcatcacggcagtacagatgtcggagctgcagtatgacatctgggtgcaaggcatgatgcgggatatggctcgaagccaggcagacaggctggccgcaattcaacccgcggaccttaccaactatttggagatggctacccagatggatatgcggactacgaggatgctgctggggctcctcaacatattgcgcatccagaatgcggcgctcaggtacgagtatcttctaatgcccacggagctcacaacatggccactgggtatggataccgtgggtgacttgctcatcgcgcaggagaatgctgcactgataggattaatgcagctagggccctcatctgatttcacgagcaggcatgtggtgaaagacatacctgtgaacttgctgctcgatggcgaggattgggagtttgagattcctgtgcaagctggcatgtccagcttcccttccagctggtctcgcgtccgtattcggcacctggagatgcactttgtgaaggaggccagcggtattggtggtgagattatccaccagcctaccacccagactgggaccgtttacatccttctgcagggttccactatcttccatgaccgcagaagagaccaggtgttgccttttcaggccgctgctccgctcaactaccattacgcgtaccgcctcgacaccggcgactccactctcacaaacgaaccctctgaacagtttgccaacaagttcatgcagatgacacccttcacccgttggaggcttcgtctgtctgcgtccgcaaaagagaatgcaggattagcctttcccacggctacagcacttgactccactacccagattgtcatcactttccatgttacggccatcagacaaattgactggcggcacgacgaagag

SEQ ID NO: 329 - DNA, 2601 bp, synthetic construct
  misc_feature 1..2601: note = Synthetic
  source 1..2601: mol_type = other DNA
atggctctcgtggattacggcaagcttttcgaggatctgaaccagataagcatgggtgtactggatcgggtagagttttcagaggtgatggtgatccacaggatgtatgtgaggctagctgatctgaatgtggggcagctcgagggagccgagaaagtgaagcggttgtatgtgtttgcggacgtggtggagctaccagtcgtggaatggcggtggccgccgcaaataccaggatcggtgacggtgatcatattgtgtcgtcttcttcaatggccaactgatgggaggcagtcggacaccgagctccacctgacattcatgaagttgcatgccatacaacgagaggaaaatcggtgggagataaccgcagcagatggcatgaactggggagtttacatacacgcagaggaagtacaggttggcgtgctgacaatgtcatggtcttcggtacttagagtttcggcacttcgctctgttataacctccggctttcgcgccgttagtgtgtttgaggtaccgggaagtgtaaggtccacccttggagctactttaaggcccgatcacgccttatatagtacaactatgcaagccacacccaacgcatcgcatattagtgcttttaaccttcgcatagtttccccgtcggcatatcgtgtttgtcctctccaaaatgacacagatacctacttaggtattccagcagacgtggcggcagttcttccagtagacgtggtgactgatcctaacatcttgctgggcatgcagacaacggtacacattgcggagctagtcaaggcatgtcatccgtcacccgatgttgtgagcgctgtaggggagcacctgaactggctcaacaaactcttactcccacttaaggaatcgactcagttgcaaggaagcgagtcgtacaaggagtgccttgcactcttgggtcgtgttcacgctgcgatgaagatggtgagaattggcttagtagtgccccagctgcaatacagaatgtacggtagcctcatcaaccaaatggcccaagtagcacaaaactacgaccgagaattcaagcaattcaaattattcatcatccaaaatcaaatccttggcagctatttgctgcagcagaacagggcatttgctgagagggagctgcagatggagagctttcatgctgctgtcatttctcaaagaagggaggagttggacaatacattcgcaaagatggaccgattgagcgggcaaatggaggcagagagtagtgcaatggagcaagccaaaaaggaaatggacgaaggattgaggcagttccagaataggcaagttgcgaacgccctctttgccgttcttagcgctgtagctcagattgggcttgcattccttacggctggtgcaacggctcctggagctgtggcgtcggcggggcaagctgtgagcatagcaggtcaggcggcgcaaggtctgcgaagggtggtggaaattctagagcagctggaggctgtgatggaggttgtggctgctgtgaaggacctcgtggattcattggaacaggtaggtcagattgtggacgcaccggtgatgccggaattgccctcagaggcggactggtccatttttgtgaacgaggtggaggccgtggcagagggcatgccaacggaagtctcggaggttccggtgtggacggtcaagtgcaagaatgtggctgcactgggtcgggagatgagcatcacggcagtacagatgtcggagctgcagtatgacatctgggtgcaaggcatgatgcgggatatggctcgaagccaggcagacaggctggccgcaattcaacccgcggaccttaccaactatttggagatggctacccagatggatatgcggactacgaggatgctgctggggctcctcaacatattgcgcatccagaatgcggcgctcaggtacgagtatcttctaatgcccacggagctcacaacatggccactgggtatggataccgtgggtgacttgctcatcgcgcaggagaatgctgcactgataggattaatgcagctagggccctcatctgatttcacgagcaggcatgtggtgaaagacatacctgtgaacttgctgctcgatggcgaggattgggagtttgagattcctgtgcaagctggcatgtccagcttcccttccagctggtctcgcgtccgtattcggcacctggagatgcactttgtgaaggaggccagcggtattggtggtgagattatccaccagcctaccacccagactgggaccgtttacatccttctgcagggttccactatcttccatgaccgcagaagagaccaggtgttgccttttcaggccgctgctccgctcaactaccattacgcgtaccgcctcgacaccggcgactccactctcacaaacgaaccctctgaacagtttgccaacaagttcatgcagatgacacccttcacccgttggaggcttcgtctgtctgcgtccgcaaaagagaatgcaggattagcctttcccacggctacagcacttgactccactacccagattgtcatcactttccatgttacggccatcagacaaattgactggcggcacgacgaagag

SEQ ID NO: 330 - DNA, 2601 bp, synthetic construct
  misc_feature 1..2601: note = Synthetic
  source 1..2601: mol_type = other DNA
atggctctcgtggattacggcaagcttttcgaggatctgaaccagataagcatgggtgtactggatcgggtagagttttcagaggtgatggtgatccacaggatgtatgtgaggctagctgatctgaatgtggggcagctcgagggagccgagaaagtgaagcggttgtatgtgtttgcggacgtggtggagctaccagtcgtggaatggcggtggccgccgcaaataccaggatcggtgacggtgatcatattgtgtcgtcttcttcaatggccaactgatgggaggcagtcggacaccgagctccacctgacattcatgaagttgcatgccatacaacgagaggaaaatcggtgggagataaccgcagcagatggcatgaactggggagtttacatacacgcagaggaagtacaggttggcgtgctgacaatgtcatggtcttcggtacttagagtttcggcacttcgctctgttataacctccggctttcgcgccgttagtgtgtttgaggtaccgggaagtgtaaggtccacccttggagctactttaaggcccgatcacgccttatatagtacaactatgcaagccacacccaacgcatcgcatattagtgcttttaaccttcgcatagtttccccgtcggcatatcgtgtttgtcctctccaaaatgacacagatacctacttaggtattccagcagacgtggcggcagttcttccagtagacgtggtgactgatcctaacatcttgctgggcatgcagacaacggtacacattgcggagctagtcaaggcatgtcatccgtcacccgatgttgtgagcgctgtaggggagcacctgaactggctcaacaaactcttactcccacttaaggaatcgactcagttgcaaggaagcgagtcgtacaaggagtgccttgcactcttgggtcgtgttcacgctgcgatgaagatggtgagaattggcttagtagtgccccagctgcaatacagaatgtacggtagcctcatcaaccaaatggcccaagtagcacaaaactacgaccgagaattcaagcaattcaaattattcatcatccaaaatcaaatccttggcagctatttgctgcagcagaacagggcatttgctgagagggagctgcagatggagagctttcatgctgctgtcatttctcaaagaagggaggagttggacaatacattcgcaaagatggaccgattgagcgggcaaatggaggcagagagtagtgcaatggagcaagccaaaaaggaaatggacgaaggattgaggcagttccagaataggcaagttgcgaacgccctctttgccgttcttagcgctgtagctcagattgggcttgcattccttacggctggtgcaacggctcctggagctgtggcgtcggcggggcaagctgtgagcatagcaggtcaggcggcgcaaggtctgcgaagggtggtggaaattctagagcagctggaggctgtgatggaggttgtggctgctgtgaaggacctcgtggattcattggaacaggtaggtcagattgtggacgcaccggtgatgccggaattgccctcagaggcggactggtccatttttgtgaacgaggtggaggccgtggcagagggcatgccaacggaagtctcggaggttccggtgtggaccgtcaagtgcaagagcgtggctgcactgggtcgggagatgagcatcacggcagtacagatgtcggagctgcagtatgacatctgggtgcaaggcatgatgcgggatatggctcgaagccaggcagacaggctggccgcaattcaacccgcggaccttaccaactatttggagatggctacccagatggatatgcggactacgaggatgctgctggggctcctcaacatattgcgcatccagaatgcggcgctcaggtacgagtatcttctaatgcccacggagctcacaacatggccactgggtatggataccgtgggtgacttgctcatcgcgcaggagaatgctgcactgataggattaatgcagctagggccctcatctgatttcacgagcaggcatgtggtgaaagacatacctgtgaacttgctgctcgatggcgaggattgggagtttgagattcctgtgcaagctggcatgtccagcttcccttccagctggtctcgcgtccgtattcggcacctggagatgcactttgtgaaggaggccagcggtattggtggtgagattatccaccagcctaccacccagactgggaccgtttacatccttctgcagggttccactatcttccatgaccgcagaagagaccaggtgttgccttttcaggccgctgctccgctcaactaccattacgcgtaccgcctcgacaccggcgactccactctcacaaacgaaccctctgaacagtttgccaacaagttcatgcagatgacacccttcacccgttggaggcttcgtctgtctgcgtccgcaaaagagaatgcaggattagcctttcccacggctacagcacttgactccactacccagattgtcatcactttccatgttacggccatcagacaaattgactggcggcacgacgaagag

SEQ ID NO: 331 - DNA, 2601 bp, synthetic construct
  misc_feature 1..2601: note = Synthetic
  source 1..2601: mol_type = other DNA
atggctctcgtggattacggcaagcttttcgaggatctgaaccagataagcatgggtgtactggatcgggtagagttttcagaggtgatggtgatccacaggatgtatgtgaggctagctgatctgaatgtggggcagctcgagggagccgagaaagtgaagcggttgtatgtgtttgcggacgtggtggagctaccagtcgtggaatggcggtggccgccgcaaataccaggatcggtgacggtgatcatattgtgtcgtcttcttcaatggccaactgatgggaggcagtcggacaccgagctccacctgacattcatgaagttgcatgccatacaacgagaggaaaatcggtgggagataaccgcagcagatggcatgaactggggagtttacatacacgcagaggaagtacaggttggcgtgctgacaatgtcatggtcttcggtacttagagtttcggcacttcgctctgttataacctccggctttcgcgccgttagtgtgtttgaggtaccgggaagtgtaaggtccacccttggagctactttaaggcccgatcacgccttatatagtacaactatgcaagccacacccaacgcatcgcatattagtgcttttaaccttcgcatagtttccccgtcggcatatcgtgtttgtcctctccaaaatgacacagatacctacttaggtattccagcagacgtggcggcagttcttccagtagacgtggtgactgatcctaacatcttgctgggcatgcagacaacggtacacattgcggagctagtcaaggcatgtcatccgtcacccgatgttgtgagcgctgtaggggagcacctgaactggctcaacaaactcttactcccacttaaggaatcgactcagttgcaaggaagcgagtcgtacaaggagtgccttgcactcttgggtcgtgttcacgctgcgatgaagatggtgagaattggcttagtagtgccccagctgcaatacagaatgtacggtagcctcatcaaccaaatggcccaagtagcacaaaactacgaccgagaattcaagcaattcaaattattcatcatccaaaatcaaatccttggcagctatttgctgcagcagaacagggcatttgctgagagggagctgcagatggagagctttcatgctgctgtcatttctcaaagaagggaggagttggacaatacattcgcaaagatggaccgattgagcgggcaaatggaggcagagagtagtgcaatggagcaagccaaaaaggaaatggacgaaggattgaggcagttccagaataggcaagttgcgaacgccctctttgccgttcttagcgctgtagctcagattgggcttgcattccttacggctggtgcaacggctcctggagctgtggcgtcggcggggcaagctgtgagcatagcaggtcaggcggcgcaaggtctgcgaagggtggtggaaattctagagcagctggaggctgtgatggaggttgtggctgctgtgaaggacctcgtggattcattggaacaggtaggtcagattgtggacgcaccggtgatgccggaattgccctcagaggcggactggtccatttttgtgaacgaggtggaggccgtggcagagggcatgccaacggaagtctcggaggttccggtgtggaccgtcaggtgcaagaatgtggctgcactgggtcgggagatgagcatcacggcagtacagatgtcggagctgcagtatgacatctgggtgcaaggcatgatgcgggatatggctcgaagccaggcagacaggctggccgcaattcaacccgcggaccttaccaactatttggagatggctacccagatggatatgcggactacgaggatgctgctggggctcctcaacatattgcgcatccagaatgcggcgctcaggtacgagtatcttctaatgcccacggagctcacaacatggccactgggtatggataccgtgggtgacttgctcatcgcgcaggagaatgctgcactgataggattaatgcagctagggccctcatctgatttcacgagcaggcatgtggtgaaagacatacctgtgaacttgctgctcgatggcgaggattgggagtttgagattcctgtgcaagctggcatgtccagcttcccttccagctggtctcgcgtccgtattcggcacctggagatgcactttgtgaaggaggccagcggtattggtggtgagattatccaccagcctaccacccagactgggaccgtttacatccttctgcagggttccactatcttccatgaccgcagaagagaccaggtgttgccttttcaggccgctgctccgctcaactaccattacgcgtaccgcctcgacaccggcgactccactctcacaaacgaaccctctgaacagtttgccaacaagttcatgcagatgacacccttcacccgttggaggcttcgtctgtctgcgtccgcaaaagagaatgcaggattagcctttcccacggctacagcacttgactccactacccagattgtcatcactttccatgttacggccatcagacaaattgactggcggcacgacgaagag

SEQ ID NO: 332 - DNA, 2601 bp, synthetic construct
  misc_feature 1..2601: note = Synthetic
  source 1..2601: mol_type = other DNA
atggctctcgtggattacggcaagcttttcgaggatctgaaccagataagcatgggtgtactggatcgggtagagttttcagaggtgatggtgatccacaggatgtatgtgaggctagctgatctgaatgtggggcagctcgagggagccgagaaagtgaagcggttgtatgtgtttgcggacgtggtggagctaccagtcgtggaatggcggtggccgccgcaaataccaggatcggtgacggtgatcatattgtgtcgtcttcttcaatggccaactgatgggaggcagtcggacaccgagctccacctgacattcatgaagttgcatgccatacaacgagaggaaaatcggtgggagataaccgcagcagatggcatgaactggggagtttacatacacgcagaggaagtacaggttggcgtgctgacaatgtcatggtcttcggtacttagagtttcggcacttcgctctgttataacctccggctttcgcgccgttagtgtgtttgaggtaccgggaagtgtaaggtccacccttggagctactttaaggcccgatcacgccttatatagtacaactatgcaagccacacccaacgcatcgcatattagtgcttttaaccttcgcatagtttccccgtcggcatatcgtgtttgtcctctccaaaatgacacagatacctacttaggtattccagcagacgtggcggcagttcttccagtagacgtggtgactgatcctaacatcttgctgggcatgcagacaacggtacacattgcggagctagtcaaggcatgtcatccgtcacccgatgttgtgagcgctgtaggggagcacctgaactggctcaacaaactcttactcccacttaaggaatcgactcagttgcaaggaagcgagtcgtacaaggagtgccttgcactcttgggtcgtgttcacgctgcgatgaagatggtgagaattggcttagtagtgccccagctgcaatacagaatgtacggtagcctcatcaaccaaatggcccaagtagcacaaaactacgaccgagaattcaagcaattcaaattattcatcatccaaaatcaaatccttggcagctatttgctgcagcagaacagggcatttgctgagagggagctgcagatggagagctttcatgctgctgtcatttctcaaagaagggaggagttggacaatacattcgcaaagatggaccgattgagcgggcaaatggaggcagagagtagtgcaatggagcaagccaaaaaggaaatggacgaaggattgaggcagttccagaataggcaagttgcgaacgccctctttgccgttcttagcgctgtagctcagattgggcttgcattccttacggctggtgcaacggctcctggagctgtggcgtcggcggggcaagctgtgagcatagcaggtcaggcggcgcaaggtctgcgaagggtggtggaaattctagagcagctggaggctgtgatggaggttgtggctgctgtgaaggacctcgtggattcattggaacaggtaggtcagattgtggacgcaccggtgatgccggaattgccctcagaggcggactggtccatttttgtgaacgaggtggaggccgtggcagagggcatgccaacggaagtctcggaggttccggtgtggagggcccggtgcaagcatgtggctgcactgggtcgggagatgagcatcacggcagtacagatgtcggagctgcagtatgacatctgggtgcaaggcatgatgcgggatatggctcgaagccaggcagacaggctggccgcaattcaacccgcggaccttaccaactatttggagatggctacccagatggatatgcggactacgaggatgctgctggggctcctcaacatattgcgcatccagaatgcggcgctcaggtacgagtatcttctaatgcccacggagctcacaacatggccactgggtatggataccgtgggtgacttgctcatcgcgcaggagaatgctgcactgataggattaatgcagctagggccctcatctgatttcacgagcaggcatgtggtgaaagacatacctgtgaacttgctgctcgatggcgaggattgggagtttgagattcctgtgcaagctggcatgtccagcttcccttccagctggtctcgcgtccgtattcggcacctggagatgcactttgtgaaggaggccagcggtattggtggtgagattatccaccagcctaccacccagactgggaccgtttacatccttctgcagggttccactatcttccatgaccgcagaagagaccaggtgttgccttttcaggccgctgctccgctcaactaccattacgcgtaccgcctcgacaccggcgactccactctcacaaacgaaccctctgaacagtttgccaacaagttcatgcagatgacacccttcacccgttggaggcttcgtctgtctgcgtccgcaaaagagaatgcaggattagcctttcccacggctacagcacttgactccactacccagattgtcatcactttccatgttacggccatcagacaaattgactggcggcacgacgaagag

SEQ ID NO: 333 - DNA, 2601 bp, synthetic construct
  misc_feature 1..2601: note = Synthetic
  source 1..2601: mol_type = other DNA
atggctctcgtggattacggcaagcttttcgaggatctgaaccagataagcatgggtgtactggatcgggtagagttttcagaggtgatggtgatccacaggatgtatgtgaggctagctgatctgaatgtggggcagctcgagggagccgagaaagtgaagcggttgtatgtgtttgcggacgtggtggagctaccagtcgtggaatggcggtggccgccgcaaataccaggatcggtgacggtgatcatattgtgtcgtcttcttcaatggccaactgatgggaggcagtcggacaccgagctccacctgacattcatgaagttgcatgccatacaacgagaggaaaatcggtgggagataaccgcagcagatggcatgaactggggagtttacatacacgcagaggaagtacaggttggcgtgctgacaatgtcatggtcttcggtacttagagtttcggcacttcgctctgttataacctccggctttcgcgccgttagtgtgtttgaggtaccgggaagtgtaaggtccacccttggagctactttaaggcccgatcacgccttatatagtacaactatgcaagccacacccaacgcatcgcatattagtgcttttaaccttcgcatagtttccccgtcggcatatcgtgtttgtcctctccaaaatgacacagatacctacttaggtattccagcagacgtggcggcagttcttccagtagacgtggtgactgatcctaacatcttgctgggcatgcagacaacggtacacattgcggagctagtcaaggcatgtcatccgtcacccgatgttgtgagcgctgtaggggagcacctgaactggctcaacaaactcttactcccacttaaggaatcgactcagttgcaaggaagcgagtcgtacaaggagtgccttgcactcttgggtcgtgttcacgctgcgatgaagatggtgagaattggcttagtagtgccccagctgcaatacagaatgtacggtagcctcatcaaccaaatggcccaagtagcacaaaactacgaccgagaattcaagcaattcaaattattcatcatccaaaatcaaatccttggcagctatttgctgcagcagaacagggcatttgctgagagggagctgcagatggagagctttcatgctgctgtcatttctcaaagaagggaggagttggacaatacattcgcaaagatggaccgattgagcgggcaaatggaggcagagagtagtgcaatggagcaagccaaaaaggaaatggacgaaggattgaggcagttccagaataggcaagttgcgaacgccctctttgccgttcttagcgctgtagctcagattgggcttgcattccttacggctggtgcaacggctcctggagctgtggcgtcggcggggcaagctgtgagcatagcaggtcaggcggcgcaaggtctgcgaagggtggtggaaattctagagcagctggaggctgtgatggaggttgtggctgctgtgaaggacctcgtggattcattggaacaggtaggtcagattgtggacgcaccggtgatgccggaattgccctcagaggcggactggtccatttttgtgaacgaggtggaggccgtggcagagggcatgccaacggaagtctcggaggttccggtgtggatcggccggtgcaagtccgtggctgcactgggtcgggagatgagcatcacggcagtacagatgtcggagctgcagtatgacatctgggtgcaaggcatgatgcgggatatggctcgaagccaggcagacaggctggccgcaattcaacccgcggaccttaccaactatttggagatggctacccagatggatatgcggactacgaggatgctgctggggctcctcaacatattgcgcatccagaatgcggcgctcaggtacgagtatcttctaatgcccacggagctcacaacatggccactgggtatggataccgtgggtgacttgctcatcgcgcaggagaatgctgcactgataggattaatgcagctagggccctcatctgatttcacgagcaggcatgtggtgaaagacatacctgtgaacttgctgctcgatggcgaggattgggagtttgagattcctgtgcaagctggcatgtccagcttcccttccagctggtctcgcgtccgtattcggcacctggagatgcactttgtgaaggaggccagcggtattggtggtgagattatccaccagcctaccacccagactgggaccgtttacatccttctgcagggttccactatcttccatgaccgcagaagagaccaggtgttgccttttcaggccgctgctccgctcaactaccattacgcgtaccgcctcgacaccggcgactccactctcacaaacgaaccctctgaacagtttgccaacaagttcatgcagatgacacccttcacccgttggaggcttcgtctgtctgcgtccgcaaaagagaatgcaggattagcctttcccacggctacagcacttgactccactacccagattgtcatcactttccatgttacggccatcagacaaattgactggcggcacgacgaagag

SEQ ID NO: 334 - protein, 867 aa, synthetic construct
  REGION 1..867: note = Synthetic
MALVDYGKLFEDLNQISMGVLDRVEFSEVMVIHRMYVRLADLNVGQLEGAEKVKRLYVFADVVELPVVEWRWPPQIPGSVTVIILCRLLQWPTDGRQSDTELHLTFMKLHAIQREENRWEITAADGMNWGVYIHAEEVQVGVLTMSWSSVLRVSALRSVITSGFRAVSVFEVPGSVRSTLGATLRPDHALYSTTMQATPNASHISAFNLRIVSPSAYRVCPLQNDTDTYLGIPADVAAVLPVDVVTDPNILLGMQTTVHIAELVKACHPSPDVVSAVGEHLNWLNKLLLPLKESTQLQGSESYKECLALLGRVHAAMKMVRIGLVVPQLQYRMYGSLINQMAQVAQNYDREFKQFKLFIIQNQILGSYLLQQNRAFAERELQMESFHAAVISQRREELDNTFAKMDRLSGQMEAESSAMEQAKKEMDEGLRQFQNRQVANALFAVLSAVAQIGLAFLTAGATAPGAVASAGQAVSIAGQAAQGLRRVVEILEQLEAVMEVVAAVKDLVDSLEQVGQIVDAPVMPELPSEADWSIFVNEVEAVAEGMPTEVSEVPVWHARCKSVAALGREMSITAVQMSELQYDIWVQGMMRDMARSQADRLAAIQPADLTNYLEMATQMDMRTTRMLLGLLNILRIQNAALRYEYLLMPTELTTWPLGMDTVGDLLIAQENAALIGLMQLGPSSDFTSRHVVKDIPVNLLLDGEDWEFEIPVQAGMSSFPSSWSRVRIRHLEMHFVKEASGIGGEIIHQPTTQTGTVYILLQGSTIFHDRRRDQVLPFQAAAPLNYHYAYRLDTGDSTLTNEPSEQFANKFMQMTPFTRWRLRLSASAKENAGLAFPTATALDSTTQIVITFHVTAIRQIDWRHDEE

SEQ ID NO: 335 - protein, 867 aa, synthetic construct
  REGION 1..867: note = Synthetic
MALVDYGKLFEDLNQISMGVLDRVEFSEVMVIHRMYVRLADLNVGQLEGAEKVKRLYVFADVVELPVVEWRWPPQIPGSVTVIILCRLLQWPTDGRQSDTELHLTFMKLHAIQREENRWEITAADGMNWGVYIHAEEVQVGVLTMSWSSVLRVSALRSVITSGFRAVSVFEVPGSVRSTLGATLRPDHALYSTTMQATPNASHISAFNLRIVSPSAYRVCPLQNDTDTYLGIPADVAAVLPVDVVTDPNILLGMQTTVHIAELVKACHPSPDVVSAVGEHLNWLNKLLLPLKESTQLQGSESYKECLALLGRVHAAMKMVRIGLVVPQLQYRMYGSLINQMAQVAQNYDREFKQFKLFIIQNQILGSYLLQQNRAFAERELQMESFHAAVISQRREELDNTFAKMDRLSGQMEAESSAMEQAKKEMDEGLRQFQNRQVANALFAVLSAVAQIGLAFLTAGATAPGAVASAGQAVSIAGQAAQGLRRVVEILEQLEAVMEVVAAVKDLVDSLEQVGQIVDAPVMPELPSEADWSIFVNEVEAVAEGMPTEVSEVPVWHGKCKNVAALGREMSITAVQMSELQYDIWVQGMMRDMARSQADRLAAIQPADLTNYLEMATQMDMRTTRMLLGLLNILRIQNAALRYEYLLMPTELTTWPLGMDTVGDLLIAQENAALIGLMQLGPSSDFTSRHVVKDIPVNLLLDGEDWEFEIPVQAGMSSFPSSWSRVRIRHLEMHFVKEASGIGGEIIHQPTTQTGTVYILLQGSTIFHDRRRDQVLPFQAAAPLNYHYAYRLDTGDSTLTNEPSEQFANKFMQMTPFTRWRLRLSASAKENAGLAFPTATALDSTTQIVITFHVTAIRQIDWRHDEE

SEQ ID NO: 336 - protein, 867 aa, synthetic construct
  REGION 1..867: note = Synthetic
MALVDYGKLFEDLNQISMGVLDRVEFSEVMVIHRMYVRLADLNVGQLEGAEKVKRLYVFADVVELPVVEWRWPPQIPGSVTVIILCRLLQWPTDGRQSDTELHLTFMKLHAIQREENRWEITAADGMNWGVYIHAEEVQVGVLTMSWSSVLRVSALRSVITSGFRAVSVFEVPGSVRSTLGATLRPDHALYSTTMQATPNASHISAFNLRIVSPSAYRVCPLQNDTDTYLGIPADVAAVLPVDVVTDPNILLGMQTTVHIAELVKACHPSPDVVSAVGEHLNWLNKLLLPLKESTQLQGSESYKECLALLGRVHAAMKMVRIGLVVPQLQYRMYGSLINQMAQVAQNYDREFKQFKLFIIQNQILGSYLLQQNRAFAERELQMESFHAAVISQRREELDNTFAKMDRLSGQMEAESSAMEQAKKEMDEGLRQFQNRQVANALFAVLSAVAQIGLAFLTAGATAPGAVASAGQAVSIAGQAAQGLRRVVEILEQLEAVMEVVAAVKDLVDSLEQVGQIVDAPVMPELPSEADWSIFVNEVEAVAEGMPTEVSEVPVWIAKCKCVAALGREMSITAVQMSELQYDIWVQGMMRDMARSQADRLAAIQPADLTNYLEMATQMDMRTTRMLLGLLNILRIQNAALRYEYLLMPTELTTWPLGMDTVGDLLIAQENAALIGLMQLGPSSDFTSRHVVKDIPVNLLLDGEDWEFEIPVQAGMSSFPSSWSRVRIRHLEMHFVKEASGIGGEIIHQPTTQTGTVYILLQGSTIFHDRRRDQVLPFQAAAPLNYHYAYRLDTGDSTLTNEPSEQFANKFMQMTPFTRWRLRLSASAKENAGLAFPTATALDSTTQIVITFHVTAIRQIDWRHDEE

SEQ ID NO: 337 - protein, 867 aa, synthetic construct
  REGION 1..867: note = Synthetic
MALVDYGKLFEDLNQISMGVLDRVEFSEVMVIHRMYVRLADLNVGQLEGAEKVKRLYVFADVVELPVVEWRWPPQIPGSVTVIILCRLLQWPTDGRQSDTELHLTFMKLHAIQREENRWEITAADGMNWGVYIHAEEVQVGVLTMSWSSVLRVSALRSVITSGFRAVSVFEVPGSVRSTLGATLRPDHALYSTTMQATPNASHISAFNLRIVSPSAYRVCPLQNDTDTYLGIPADVAAVLPVDVVTDPNILLGMQTTVHIAELVKACHPSPDVVSAVGEHLNWLNKLLLPLKESTQLQGSESYKECLALLGRVHAAMKMVRIGLVVPQLQYRMYGSLINQMAQVAQNYDREFKQFKLFIIQNQILGSYLLQQNRAFAERELQMESFHAAVISQRREELDNTFAKMDRLSGQMEAESSAMEQAKKEMDEGLRQFQNRQVANALFAVLSAVAQIGLAFLTAGATAPGAVASAGQAVSIAGQAAQGLRRVVEILEQLEAVMEVVAAVKDLVDSLEQVGQIVDAPVMPELPSEADWSIFVNEVEAVAEGMPTEVSEVPVWIAKCKSVAALGREMSITAVQMSELQYDIWVQGMMRDMARSQADRLAAIQPADLTNYLEMATQMDMRTTRMLLGLLNILRIQNAALRYEYLLMPTELTTWPLGMDTVGDLLIAQENAALIGLMQLGPSSDFTSRHVVKDIPVNLLLDGEDWEFEIPVQAGMSSFPSSWSRVRIRHLEMHFVKEASGIGGEIIHQPTTQTGTVYILLQGSTIFHDRRRDQVLPFQAAAPLNYHYAYRLDTGDSTLTNEPSEQFANKFMQMTPFTRWRLRLSASAKENAGLAFPTATALDSTTQIVITFHVTAIRQIDWRHDEE

SEQ ID NO: 338 - protein, 867 aa, synthetic construct
  REGION 1..867: note = Synthetic
MALVDYGKLFEDLNQISMGVLDRVEFSEVMVIHRMYVRLADLNVGQLEGAEKVKRLYVFADVVELPVVEWRWPPQIPGSVTVIILCRLLQWPTDGRQSDTELHLTFMKLHAIQREENRWEITAADGMNWGVYIHAEEVQVGVLTMSWSSVLRVSALRSVITSGFRAVSVFEVPGSVRSTLGATLRPDHALYSTTMQATPNASHISAFNLRIVSPSAYRVCPLQNDTDTYLGIPADVAAVLPVDVVTDPNILLGMQTTVHIAELVKACHPSPDVVSAVGEHLNWLNKLLLPLKESTQLQGSESYKECLALLGRVHAAMKMVRIGLVVPQLQYRMYGSLINQMAQVAQNYDREFKQFKLFIIQNQILGSYLLQQNRAFAERELQMESFHAAVISQRREELDNTFAKMDRLSGQMEAESSAMEQAKKEMDEGLRQFQNRQVANALFAVLSAVAQIGLAFLTAGATAPGAVASAGQAVSIAGQAAQGLRRVVEILEQLEAVMEVVAAVKDLVDSLEQVGQIVDAPVMPELPSEADWSIFVNEVEAVAEGMPTEVSEVPVWIGKCKNVAALGREMSITAVQMSELQYDIWVQGMMRDMARSQADRLAAIQPADLTNYLEMATQMDMRTTRMLLGLLNILRIQNAALRYEYLLMPTELTTWPLGMDTVGDLLIAQENAALIGLMQLGPSSDFTSRHVVKDIPVNLLLDGEDWEFEIPVQAGMSSFPSSWSRVRIRHLEMHFVKEASGIGGEIIHQPTTQTGTVYILLQGSTIFHDRRRDQVLPFQAAAPLNYHYAYRLDTGDSTLTNEPSEQFANKFMQMTPFTRWRLRLSASAKENAGLAFPTATALDSTTQIVITFHVTAIRQIDWRHDEE

SEQ ID NO: 339 - protein, 867 aa, synthetic construct
  REGION 1..867: note = Synthetic
MALVDYGKLFEDLNQISMGVLDRVEFSEVMVIHRMYVRLADLNVGQLEGAEKVKRLYVFADVVELPVVEWRWPPQIPGSVTVIILCRLLQWPTDGRQSDTELHLTFMKLHAIQREENRWEITAADGMNWGVYIHAEEVQVGVLTMSWSSVLRVSALRSVITSGFRAVSVFEVPGSVRSTLGATLRPDHALYSTTMQATPNASHISAFNLRIVSPSAYRVCPLQNDTDTYLGIPADVAAVLPVDVVTDPNILLGMQTTVHIAELVKACHPSPDVVSAVGEHLNWLNKLLLPLKESTQLQGSESYKECLALLGRVHAAMKMVRIGLVVPQLQYRMYGSLINQMAQVAQNYDREFKQFKLFIIQNQILGSYLLQQNRAFAERELQMESFHAAVISQRREELDNTFAKMDRLSGQMEAESSAMEQAKKEMDEGLRQFQNRQVANALFAVLSAVAQIGLAFLTAGATAPGAVASAGQAVSIAGQAAQGLRRVVEILEQLEAVMEVVAAVKDLVDSLEQVGQIVDAPVMPELPSEADWSIFVNEVEAVAEGMPTEVSEVPVWIGKCKSVAALGREMSITAVQMSELQYDIWVQGMMRDMARSQADRLAAIQPADLTNYLEMATQMDMRTTRMLLGLLNILRIQNAALRYEYLLMPTELTTWPLGMDTVGDLLIAQENAALIGLMQLGPSSDFTSRHVVKDIPVNLLLDGEDWEFEIPVQAGMSSFPSSWSRVRIRHLEMHFVKEASGIGGEIIHQPTTQTGTVYILLQGSTIFHDRRRDQVLPFQAAAPLNYHYAYRLDTGDSTLTNEPSEQFANKFMQMTPFTRWRLRLSASAKENAGLAFPTATALDSTTQIVITFHVTAIRQIDWRHDEE

SEQ ID NO: 340 - protein, 867 aa, synthetic construct
  REGION 1..867: note = Synthetic
MALVDYGKLFEDLNQISMGVLDRVEFSEVMVIHRMYVRLADLNVGQLEGAEKVKRLYVFADVVELPVVEWRWPPQIPGSVTVIILCRLLQWPTDGRQSDTELHLTFMKLHAIQREENRWEITAADGMNWGVYIHAEEVQVGVLTMSWSSVLRVSALRSVITSGFRAVSVFEVPGSVRSTLGATLRPDHALYSTTMQATPNASHISAFNLRIVSPSAYRVCPLQNDTDTYLGIPADVAAVLPVDVVTDPNILLGMQTTVHIAELVKACHPSPDVVSAVGEHLNWLNKLLLPLKESTQLQGSESYKECLALLGRVHAAMKMVRIGLVVPQLQYRMYGSLINQMAQVAQNYDREFKQFKLFIIQNQILGSYLLQQNRAFAERELQMESFHAAVISQRREELDNTFAKMDRLSGQMEAESSAMEQAKKEMDEGLRQFQNRQVANALFAVLSAVAQIGLAFLTAGATAPGAVASAGQAVSIAGQAAQGLRRVVEILEQLEAVMEVVAAVKDLVDSLEQVGQIVDAPVMPELPSEADWSIFVNEVEAVAEGMPTEVSEVPVWIGKCNNVAALGREMSITAVQMSELQYDIWVQGMMRDMARSQADRLAAIQPADLTNYLEMATQMDMRTTRMLLGLLNILRIQNAALRYEYLLMPTELTTWPLGMDTVGDLLIAQENAALIGLMQLGPSSDFTSRHVVKDIPVNLLLDGEDWEFEIPVQAGMSSFPSSWSRVRIRHLEMHFVKEASGIGGEIIHQPTTQTGTVYILLQGSTIFHDRRRDQVLPFQAAAPLNYHYAYRLDTGDSTLTNEPSEQFANKFMQMTPFTRWRLRLSASAKENAGLAFPTATALDSTTQIVITFHVTAIRQIDWRHDEE

SEQ ID NO: 341 - protein, 867 aa, synthetic construct
  REGION 1..867: note = Synthetic
MALVDYGKLFEDLNQISMGVLDRVEFSEVMVIHRMYVRLADLNVGQLEGAEKVKRLYVFADVVELPVVEWRWPPQIPGSVTVIILCRLLQWPTDGRQSDTELHLTFMKLHAIQREENRWEITAADGMNWGVYIHAEEVQVGVLTMSWSSVLRVSALRSVITSGFRAVSVFEVPGSVRSTLGATLRPDHALYSTTMQATPNASHISAFNLRIVSPSAYRVCPLQNDTDTYLGIPADVAAVLPVDVVTDPNILLGMQTTVHIAELVKACHPSPDVVSAVGEHLNWLNKLLLPLKESTQLQGSESYKECLALLGRVHAAMKMVRIGLVVPQLQYRMYGSLINQMAQVAQNYDREFKQFKLFIIQNQILGSYLLQQNRAFAERELQMESFHAAVISQRREELDNTFAKMDRLSGQMEAESSAMEQAKKEMDEGLRQFQNRQVANALFAVLSAVAQIGLAFLTAGATAPGAVASAGQAVSIAGQAAQGLRRVVEILEQLEAVMEVVAAVKDLVDSLEQVGQIVDAPVMPELPSEADWSIFVNEVEAVAEGMPTEVSEVPVWIVKCKSVAALGREMSITAVQMSELQYDIWVQGMMRDMARSQADRLAAIQPADLTNYLEMATQMDMRTTRMLLGLLNILRIQNAALRYEYLLMPTELTTWPLGMDTVGDLLIAQENAALIGLMQLGPSSDFTSRHVVKDIPVNLLLDGEDWEFEIPVQAGMSSFPSSWSRVRIRHLEMHFVKEASGIGGEIIHQPTTQTGTVYILLQGSTIFHDRRRDQVLPFQAAAPLNYHYAYRLDTGDSTLTNEPSEQFANKFMQMTPFTRWRLRLSASAKENAGLAFPTATALDSTTQIVITFHVTAIRQIDWRHDEE

SEQ ID NO: 342 - protein, 867 aa, synthetic construct
  REGION 1..867: note = Synthetic
MALVDYGKLFEDLNQISMGVLDRVEFSEVMVIHRMYVRLADLNVGQLEGAEKVKRLYVFADVVELPVVEWRWPPQIPGSVTVIILCRLLQWPTDGRQSDTELHLTFMKLHAIQREENRWEITAADGMNWGVYIHAEEVQVGVLTMSWSSVLRVSALRSVITSGFRAVSVFEVPGSVRSTLGATLRPDHALYSTTMQATPNASHISAFNLRIVSPSAYRVCPLQNDTDTYLGIPADVAAVLPVDVVTDPNILLGMQTTVHIAELVKACHPSPDVVSAVGEHLNWLNKLLLPLKESTQLQGSESYKECLALLGRVHAAMKMVRIGLVVPQLQYRMYGSLINQMAQVAQNYDREFKQFKLFIIQNQILGSYLLQQNRAFAERELQMESFHAAVISQRREELDNTFAKMDRLSGQMEAESSAMEQAKKEMDEGLRQFQNRQVANALFAVLSAVAQIGLAFLTAGATAPGAVASAGQAVSIAGQAAQGLRRVVEILEQLEAVMEVVAAVKDLVDSLEQVGQIVDAPVMPELPSEADWSIFVNEVEAVAEGMPTEVSEVPVWLARCKNVAALGREMSITAVQMSELQYDIWVQGMMRDMARSQADRLAAIQPADLTNYLEMATQMDMRTTRMLLGLLNILRIQNAALRYEYLLMPTELTTWPLGMDTVGDLLIAQENAALIGLMQLGPSSDFTSRHVVKDIPVNLLLDGEDWEFEIPVQAGMSSFPSSWSRVRIRHLEMHFVKEASGIGGEIIHQPTTQTGTVYILLQGSTIFHDRRRDQVLPFQAAAPLNYHYAYRLDTGDSTLTNEPSEQFANKFMQMTPFTRWRLRLSASAKENAGLAFPTATALDSTTQIVITFHVTAIRQIDWRHDEE

SEQ ID NO: 343 - protein, 867 aa, synthetic construct
  REGION 1..867: note = Synthetic
MALVDYGKLFEDLNQISMGVLDRVEFSEVMVIHRMYVRLADLNVGQLEGAEKVKRLYVFADVVELPVVEWRWPPQIPGSVTVIILCRLLQWPTDGRQSDTELHLTFMKLHAIQREENRWEITAADGMNWGVYIHAEEVQVGVLTMSWSSVLRVSALRSVITSGFRAVSVFEVPGSVRSTLGATLRPDHALYSTTMQATPNASHISAFNLRIVSPSAYRVCPLQNDTDTYLGIPADVAAVLPVDVVTDPNILLGMQTTVHIAELVKACHPSPDVVSAVGEHLNWLNKLLLPLKESTQLQGSESYKECLALLGRVHAAMKMVRIGLVVPQLQYRMYGSLINQMAQVAQNYDREFKQFKLFIIQNQILGSYLLQQNRAFAERELQMESFHAAVISQRREELDNTFAKMDRLSGQMEAESSAMEQAKKEMDEGLRQFQNRQVANALFAVLSAVAQIGLAFLTAGATAPGAVASAGQAVSIAGQAAQGLRRVVEILEQLEAVMEVVAAVKDLVDSLEQVGQIVDAPVMPELPSEADWSIFVNEVEAVAEGMPTEVSEVPVWLARCKSVAALGREMSITAVQMSELQYDIWVQGMMRDMARSQADRLAAIQPADLTNYLEMATQMDMRTTRMLLGLLNILRIQNAALRYEYLLMPTELTTWPLGMDTVGDLLIAQENAALIGLMQLGPSSDFTSRHVVKDIPVNLLLDGEDWEFEIPVQAGMSSFPSSWSRVRIRHLEMHFVKEASGIGGEIIHQPTTQTGTVYILLQGSTIFHDRRRDQVLPFQAAAPLNYHYAYRLDTGDSTLTNEPSEQFANKFMQMTPFTRWRLRLSASAKENAGLAFPTATALDSTTQIVITFHVTAIRQIDWRHDEE

SEQ ID NO: 344 - protein, 867 aa, synthetic construct
  REGION 1..867: note = Synthetic
MALVDYGKLFEDLNQISMGVLDRVEFSEVMVIHRMYVRLADLNVGQLEGAEKVKRLYVFADVVELPVVEWRWPPQIPGSVTVIILCRLLQWPTDGRQSDTELHLTFMKLHAIQREENRWEITAADGMNWGVYIHAEEVQVGVLTMSWSSVLRVSALRSVITSGFRAVSVFEVPGSVRSTLGATLRPDHALYSTTMQATPNASHISAFNLRIVSPSAYRVCPLQNDTDTYLGIPADVAAVLPVDVVTDPNILLGMQTTVHIAELVKACHPSPDVVSAVGEHLNWLNKLLLPLKESTQLQGSESYKECLALLGRVHAAMKMVRIGLVVPQLQYRMYGSLINQMAQVAQNYDREFKQFKLFIIQNQILGSYLLQQNRAFAERELQMESFHAAVISQRREELDNTFAKMDRLSGQMEAESSAMEQAKKEMDEGLRQFQNRQVANALFAVLSAVAQIGLAFLTAGATAPGAVASAGQAVSIAGQAAQGLRRVVEILEQLEAVMEVVAAVKDLVDSLEQVGQIVDAPVMPELPSEADWSIFVNEVEAVAEGMPTEVSEVPVWLGRCKNVAALGREMSITAVQMSELQYDIWVQGMMRDMARSQADRLAAIQPADLTNYLEMATQMDMRTTRMLLGLLNILRIQNAALRYEYLLMPTELTTWPLGMDTVGDLLIAQENAALIGLMQLGPSSDFTSRHVVKDIPVNLLLDGEDWEFEIPVQAGMSSFPSSWSRVRIRHLEMHFVKEASGIGGEIIHQPTTQTGTVYILLQGSTIFHDRRRDQVLPFQAAAPLNYHYAYRLDTGDSTLTNEPSEQFANKFMQMTPFTRWRLRLSASAKENAGLAFPTATALDSTTQIVITFHVTAIRQIDWRHDEE

SEQ ID NO: 345 - protein, 867 aa, synthetic construct
  REGION 1..867: note = Synthetic
MALVDYGKLFEDLNQISMGVLDRVEFSEVMVIHRMYVRLADLNVGQLEGAEKVKRLYVFADVVELPVVEWRWPPQIPGSVTVIILCRLLQWPTDGRQSDTELHLTFMKLHAIQREENRWEITAADGMNWGVYIHAEEVQVGVLTMSWSSVLRVSALRSVITSGFRAVSVFEVPGSVRSTLGATLRPDHALYSTTMQATPNASHISAFNLRIVSPSAYRVCPLQNDTDTYLGIPADVAAVLPVDVVTDPNILLGMQTTVHIAELVKACHPSPDVVSAVGEHLNWLNKLLLPLKESTQLQGSESYKECLALLGRVHAAMKMVRIGLVVPQLQYRMYGSLINQMAQVAQNYDREFKQFKLFIIQNQILGSYLLQQNRAFAERELQMESFHAAVISQRREELDNTFAKMDRLSGQMEAESSAMEQAKKEMDEGLRQFQNRQVANALFAVLSAVAQIGLAFLTAGATAPGAVASAGQAVSIAGQAAQGLRRVVEILEQLEAVMEVVAAVKDLVDSLEQVGQIVDAPVMPELPSEADWSIFVNEVEAVAEGMPTEVSEVPVWLGRCKSVAALGREMSITAVQMSELQYDIWVQGMMRDMARSQADRLAAIQPADLTNYLEMATQMDMRTTRMLLGLLNILRIQNAALRYEYLLMPTELTTWPLGMDTVGDLLIAQENAALIGLMQLGPSSDFTSRHVVKDIPVNLLLDGEDWEFEIPVQAGMSSFPSSWSRVRIRHLEMHFVKEASGIGGEIIHQPTTQTGTVYILLQGSTIFHDRRRDQVLPFQAAAPLNYHYAYRLDTGDSTLTNEPSEQFANKFMQMTPFTRWRLRLSASAKENAGLAFPTATALDSTTQIVITFHVTAIRQIDWRHDEE

SEQ ID NO: 346 - protein, 867 aa, synthetic construct
  REGION 1..867: note = Synthetic
MALVDYGKLFEDLNQISMGVLDRVEFSEVMVIHRMYVRLADLNVGQLEGAEKVKRLYVFADVVELPVVEWRWPPQIPGSVTVIILCRLLQWPTDGRQSDTELHLTFMKLHAIQREENRWEITAADGMNWGVYIHAEEVQVGVLTMSWSSVLRVSALRSVITSGFRAVSVFEVPGSVRSTLGATLRPDHALYSTTMQATPNASHISAFNLRIVSPSAYRVCPLQNDTDTYLGIPADVAAVLPVDVVTDPNILLGMQTTVHIAELVKACHPSPDVVSAVGEHLNWLNKLLLPLKESTQLQGSESYKECLALLGRVHAAMKMVRIGLVVPQLQYRMYGSLINQMAQVAQNYDREFKQFKLFIIQNQILGSYLLQQNRAFAERELQMESFHAAVISQRREELDNTFAKMDRLSGQMEAESSAMEQAKKEMDEGLRQFQNRQVANALFAVLSAVAQIGLAFLTAGATAPGAVASAGQAVSIAGQAAQGLRRVVEILEQLEAVMEVVAAVKDLVDSLEQVGQIVDAPVMPELPSEADWSIFVNEVEAVAEGMPTEVSEVPVWLVKCKCVAALGREMSITAVQMSELQYDIWVQGMMRDMARSQADRLAAIQPADLTNYLEMATQMDMRTTRMLLGLLNILRIQNAALRYEYLLMPTELTTWPLGMDTVGDLLIAQENAALIGLMQLGPSSDFTSRHVVKDIPVNLLLDGEDWEFEIPVQAGMSSFPSSWSRVRIRHLEMHFVKEASGIGGEIIHQPTTQTGTVYILLQGSTIFHDRRRDQVLPFQAAAPLNYHYAYRLDTGDSTLTNEPSEQFANKFMQMTPFTRWRLRLSASAKENAGLAFPTATALDSTTQIVITFHVTAIRQIDWRHDEE

SEQ ID NO: 347 - protein, 867 aa, synthetic construct
  REGION 1..867: note = Synthetic
MALVDYGKLFEDLNQISMGVLDRVEFSEVMVIHRMYVRLADLNVGQLEGAEKVKRLYVFADVVELPVVEWRWPPQIPGSVTVIILCRLLQWPTDGRQSDTELHLTFMKLHAIQREENRWEITAADGMNWGVYIHAEEVQVGVLTMSWSSVLRVSALRSVITSGFRAVSVFEVPGSVRSTLGATLRPDHALYSTTMQATPNASHISAFNLRIVSPSAYRVCPLQNDTDTYLGIPADVAAVLPVDVVTDPNILLGMQTTVHIAELVKACHPSPDVVSAVGEHLNWLNKLLLPLKESTQLQGSESYKECLALLGRVHAAMKMVRIGLVVPQLQYRMYGSLINQMAQVAQNYDREFKQFKLFIIQNQILGSYLLQQNRAFAERELQMESFHAAVISQRREELDNTFAKMDRLSGQMEAESSAMEQAKKEMDEGLRQFQNRQVANALFAVLSAVAQIGLAFLTAGATAPGAVASAGQAVSIAGQAAQGLRRVVEILEQLEAVMEVVSAVKDLVDSLEQVGQIVDAPVMPELPSEADWSIFVNEVEAVAEGMPTEVSEVPVWMAKCKNVAALGREMSITAVQMSELQYDIWVQGMMRDMARSQADRLAAIQPADLTNYLEMATQMDMRTTRMLLGLLNILRIQNAALRYEYLLMPTELTTWPLGMDTVGDLLIAQENAALIGLMQLGPSSDFTSRHVVKDIPVNLLLDGEDWEFEIPVQAGMSSFPSSWSRVRIRHLEMHFVKEASGIGGEIIHQPTTQTGTVYILLQGSTIFHDRRRDQVLPFQAAAPLNYHYAYRLDTGDSTLTNEPSEQFANKFMQMTPFTRWRLRLSASAKENAGLAFPTATALDSTTQIVITFHVTAIRQIDWRHDEE

SEQ ID NO: 348 - protein, 867 aa, synthetic construct
  REGION 1..867: note = Synthetic
MALVDYGKLFEDLNQISMGVLDRVEFSEVMVIHRMYVRLADLNVGQLEGAEKVKRLYVFADVVELPVVEWRWPPQIPGSVTVIILCRLLQWPTDGRQSDTELHLTFMKLHAIQREENRWEITAADGMNWGVYIHAEEVQVGVLTMSWSSVLRVSALRSVITSGFRAVSVFEVPGSVRSTLGATLRPDHALYSTTMQATPNASHISAFNLRIVSPSAYRVCPLQNDTDTYLGIPADVAAVLPVDVVTDPNILLGMQTTVHIAELVKACHPSPDVVSAVGEHLNWLNKLLLPLKESTQLQGSESYKECLALLGRVHAAMKMVRIGLVVPQLQYRMYGSLINQMAQVAQNYDREFKQFKLFIIQNQILGSYLLQQNRAFAERELQMESFHAAVISQRREELDNTFAKMDRLSGQMEAESSAMEQAKKEMDEGLRQFQNRQVANALFAVLSAVAQIGLAFLTAGATAPGAVASAGQAVSIAGQAAQGLRRVVEILEQLEAVMEVVAAVKDLVDSLEQVGQIVDAPVMPELPSEADWSIFVNEVEAVAEGMPTEVSEVPVWMGRCKSVAALGREMSITAVQMSELQYDIWVQGMMRDMARSQADRLAAIQPADLTNYLEMATQMDMRTTRMLLGLLNILRIQNAALRYEYLLMPTELTTWPLGMDTVGDLLIAQENAALIGLMQLGPSSDFTSRHVVKDIPVNLLLDGEDWEFEIPVQAGMSSFPSSWSRVRIRHLEMHFVKEASGIGGEIIHQPTTQTGTVYILLQGSTIFHDRRRDQVLPFQAAAPLNYHYAYRLDTGDSTLTNEPSEQFANKFMQMTPFTRWRLRLSASAKENAGLAFPTATALDSTTQIVITFHVTAIRQIDWRHDEE

SEQ ID NO: 349 - protein, 867 aa, synthetic construct
  REGION 1..867: note = Synthetic
MALVDYGKLFEDLNQISMGVLDRVEFSEVMVIHRMYVRLADLNVGQLEGAEKVKRLYVFADVVELPVVEWRWPPQIPGSVTVIILCRLLQWPTDGRQSDTELHLTFMKLHAIQREENRWEITAADGMNWGVYIHAEEVQVGVLTMSWSSVLRVSALRSVITSGFRAVSVFEVPGSVRSTLGATLRPDHALYSTTMQATPNASHISAFNLRIVSPSAYRVCPLQNDTDTYLGIPADVAAVLPVDVVTDPNILLGMQTTVHIAELVKACHPSPDVVSAVGEHLNWLNKLLLPLKESTQLQGSESYKECLALLGRVHAAMKMVRIGLVVPQLQYRMYGSLINQMAQVAQNYDREFKQFKLFIIQNQILGSYLLQQNRAFAERELQMESFHAAVISQRREELDNTFAKMDRLSGQMEAESSAMEQAKKEMDEGLRQFQNRQVANALFAVLSAVAQIGLAFLTAGATAPGAVASAGQAVSIAGQAAQGLRRVVEILEQLEAVMEVVAAVKDLVDSLEQVGQIVDAPVMPELPSEADWSIFVNEVEAVAEGMPTEVSEVPVWMVKCKNVAALGREMSITAVQMSELQYDIWVQGMMRDMARSQADRLAAIQPADLTNYLEMATQMDMRTTRMLLGLLNILRIQNAALRYEYLLMPTELTTWPLGMDTVGDLLIAQENAALIGLMQLGPSSDFTSRHVVKDIPVNLLLDGEDWEFEIPVQAGMSSFPSSWSRVRIRHLEMHFVKEASGIGGEIIHQPTTQTGTVYILLQGSTIFHDRRRDQVLPFQAAAPLNYHYAYRLDTGDSTLTNEPSEQFANKFMQMTPFTRWRLRLSASAKENAGLAFPTATALDSTTQIVITFHVTAIRQIDWRHDEE

SEQ ID NO: 350 - protein, 867 aa, synthetic construct
  REGION 1..867: note = Synthetic
MALVDYGKLFEDLNQISMGVLDRVEFSEVMVIHRMYVRLADLNVGQLEGAEKVKRLYVFADVVELPVVEWRWPPQIPGSVTVIILCRLLQWPTDGRQSDTELHLTFMKLHAIQREENRWEITAADGMNWGVYIHAEEVQVGVLTMSWSSVLRVSALRSVITSGFRAVSVFEVPGSVRSTLGATLRPDHALYSTTMQATPNASHISAFNLRIVSPSAYRVCPLQNDTDTYLGIPADVAAVLPVDVVTDPNILLGMQTTVHIAELVKACHPSPDVVSAVGEHLNWLNKLLLPLKESTQLQGSESYKECLALLGRVHAAMKMVRIGLVVPQLQYRMYGSLINQMAQVAQNYDREFKQFKLFIIQNQILGSYLLQQNRAFAERELQMESFHAAVISQRREELDNTFAKMDRLSGQMEAESSAMEQAKKEMDEGLRQFQNRQVANALFAVLSAVAQIGLAFLTAGATAPGAVASAGQAVSIAGQAAQGLRRVVEILEQLEAVMEVVAAVKDLVDSLEQVGQIVDAPVMPELPSEADWSIFVNEVEAVAEGMPTEVSEVPVWMVKCKSVAALGREMSITAVQMSELQYDIWVQGMMRDMARSQADRLAAIQPADLTNYLEMATQMDMRTTRMLLGLLNILRIQNAALRYEYLLMPTELTTWPLGMDTVGDLLIAQENAALIGLMQLGPSSDFTSRHVVKDIPVNLLLDGEDWEFEIPVQAGMSSFPSSWSRVRIRHLEMHFVKEASGIGGEIIHQPTTQTGTVYILLQGSTIFHDRRRDQVLPFQAAAPLNYHYAYRLDTGDSTLTNEPSEQFANKFMQMTPFTRWRLRLSASAKENAGLAFPTATALDSTTQIVITFHVTAIRQIDWRHDEE

SEQ ID NO: 351 - protein, 867 aa, synthetic construct
  REGION 1..867: note = Synthetic
MALVDYGKLFEDLNQISMGVLDRVEFSEVMVIHRMYVRLADLNVGQLEGAEKVKRLYVFADVVELPVVEWRWPPQIPGSVTVIILCRLLQWPTDGRQSDTELHLTFMKLHAIQREENRWEITAADGMNWGVYIHAEEVQVGVLTMSWSSVLRVSALRSVITSGFRAVSVFEVPGSVRSTLGATLRPDHALYSTTMQATPNASHISAFNLRIVSPSAYRVCPLQNDTDTYLGIPADVAAVLPVDVVTDPNILLGMQTTVHIAELVKACHPSPDVVSAVGEHLNWLNKLLLPLKESTQLQGSESYKECLALLGRVHAAMKMVRIGLVVPQLQYRMYGSLINQMAQVAQNYDREFKQFKLFIIQNQILGSYLLQQNRAFAERELQMESFHAAVISQRREELDNTFAKMDRLSGQMEAESSAMEQAKKEMDEGLRQFQNRQVANALFAVLSAVAQIGLAFLTAGATAPGAVASAGQAVSIAGQAAQGLRRVVEILEQLEAVMEVVAAVKDLVDSLEQVGQIVDAPVMPELPSEADWSIFVNEVEAVAEGMPTEVSEVPVWMVRCKNVAALGREMSITAVQMSELQYDIWVQGMMRDMARSQADRLAAIQPADLTNYLEMATQMDMRTTRMLLGLLNILRIQNAALRYEYLLMPTELTTWPLGMDTVGDLLIAQENAALIGLMQLGPSSDFTSRHVVKDIPVNLLLDGEDWEFEIPVQAGMSSFPSSWSRVRIRHLEMHFVKEASGIGGEIIHQPTTQTGTVYILLQGSTIFHDRRRDQVLPFQAAAPLNYHYAYRLDTGDSTLTNEPSEQFANKFMQMTPFTRWRLRLSASAKENAGLAFPTATALDSTTQIVITFHVTAIRQIDWRHDEE

SEQ ID NO: 352 - protein, 867 aa, synthetic construct
  REGION 1..867: note = Synthetic
MALVDYGKLFEDLNQISMGVLDRVEFSEVMVIHRMYVRLADLNVGQLEGAEKVKRLYVFADVVELPVVEWRWPPQIPGSVTVIILCRLLQWPTDGRQSDTELHLTFMKLHAIQREENRWEITAADGMNWGVYIHAEEVQVGVLTMSWSSVLRVSALRSVITSGFRAVSVFEVPGSVRSTLGATLRPDHALYSTTMQATPNASHISAFNLRIVSPSAYRVCPLQNDTDTYLGIPADVAAVLPVDVVTDPNILLGMQTTVHIAELVKACHPSPDVVSAVGEHLNWLNKLLLPLKESTQLQGSESYKECLALLGRVHAAMKMVRIGLVVPQLQYRMYGSLINQMAQVAQNYDREFKQFKLFIIQNQILGSYLLQQNRAFAERELQMESFHAAVISQRREELDNTFAKMDRLSGQMEAESSAMEQAKKEMDEGLRQFQNRQVANALFAVLSAVAQIGLAFLTAGATAPGAVASAGQAVSIAGQAAQGLRRVVEILEQLEAVMEVVAAVKDLVDSLEQVGQIVDAPVMPELPSEADWSIFVNEVEAVAEGMPTEVSEVPVWQARCKHVAALGREMSITAVQMSELQYDIWVQGMMRDMARSQADRLAAIQPADLTNYLEMATQMDMRTTRMLLGLLNILRIQNAALRYEYLLMPTELTTWPLGMDTVGDLLIAQENAALIGLMQLGPSSDFTSRHVVKDIPVNLLLDGEDWEFEIPVQAGMSSFPSSWSRVRIRHLEMHFVKEASGIGGEIIHQPTTQTGTVYILLQGSTIFHDRRRDQVLPFQAAAPLNYHYAYRLDTGDSTLTNEPSEQFANKFMQMTPFTRWRLRLSASAKENAGLAFPTATALDSTTQIVITFHVTAIRQIDWRHDEE

SEQ ID NO: 353 - protein, 867 aa, synthetic construct
  REGION 1..867: note = Synthetic
MALVDYGKLFEDLNQISMGVLDRVEFSEVMVIHRMYVRLADLNVGQLEGAEKVKRLYVFADVVELPVVEWRWPPQIPGSVTVIILCRLLQWPTDGRQSDTELHLTFMKLHAIQREENRWEITAADGMNWGVYIHAEEVQVGVLTMSWSSVLRVSALRSVITSGFRAVSVFEVPGSVRSTLGATLRPDHALYSTTMQATPNASHISAFNLRIVSPSAYRVCPLQNDTDTYLGIPADVAAVLPVDVVTDPNILLGMQTTVHIAELVKACHPSPDVVSAVGEHLNWLNKLLLPLKESTQLQGSESYKECLALLGRVHAAMKMVRIGLVVPQLQYRMYGSLINQMAQVAQNYDREFKQFKLFIIQNQILGSYLLQQNRAFAERELQMESFHAAVISQRREELDNTFAKMDRLSGQMEAESSAMEQAKKEMDEGLRQFQNRQVANALFAVLSAVAQIGLAFLTAGATAPGAVASAGQAVSIAGQAAQGLRRVVEILEQLEAVMEVVAAVNDLVDSLEQVGQIVDAPVMPELPSEADWSIFVNEVEAVAEGMPTEVSEVPVWQARCKNVAALGREMSITAVQMSELQYDIWVQGMMRDMARSQADRLAAIQPADLTNYLEMATQMDMRTTRMLLGLLNILRIQNAALRYEYLLMPTELTTWPLGMDTVGDLLIAQENAALIGLMQLGPSSDFTSRHVVKDIPVNLLLDGEDWEFEIPVQAGMSSFPSSWSRVRIRHLEMHFVKEASGIGGEIIHQPTTQTGTVYILLQGSTIFHDRRRDQVLPFQAAAPLNYHYAYRLDTGDSTLTNEPSEQFANKFMQMTPFTRWRLRLSASAKENAGLAFPTATALDSTTQIVITFHVTAIRQIDWRHDEE

SEQ ID NO: 354 - protein, 867 aa, synthetic construct
  REGION 1..867: note = Synthetic
MALVDYGKLFEDLNQISMGVLDRVEFSEVMVIHRMYVRLADLNVGQLEGAEKVKRLYVFADVVELPVVEWRWPPQIPGSVTVIILCRLLQWPTDGRQSDTELHLTFMKLHAIQREENRWEITAADGMNWGVYIHAEEVQVGVLTMSWSSVLRVSALRSVITSGFRAVSVFEVPGSVRSTLGATLRPDHALYSTTMQATPNASHISAFNLRIVSPSAYRVCPLQNDTDTYLGIPADVAAVLPVDVVTDPNILLGMQTTVHIAELVKACHPSPDVVSAVGEHLNWLNKLLLPLKESTQLQGSESYKECLALLGRVHAAMKMVRIGLVVPQLQYRMYGSLINQMAQVAQNYDREFKQFKLFIIQNQILGSYLLQQNRAFAERELQMESFHAAVISQRREELDNTFAKMDRLSGQMEAESSAMEQAKKEMDEGLRQFQNRQVANALFAVLSAVAQIGLAFLTAGATAPGAVASAGQAVSIAGQAAQGLRRVVEILEQLEAVMEVVAAVKDLVDSLEQVGQIVDAPVMPELPSEADWSIFVNEVEAVAEGMPTEVSEVPVWQGRCKNVAALGREMSITAVQMSELQYDIWVQGMMRDMARSQADRLAAIQPADLTNYLEMATQMDMRTTRMLLGLLNILRIQNAALRYEYLLMPTELTTWPLGMDTVGDLLIAQENAALIGLMQLGPSSDFTSRHVVKDIPVNLLLDGEDWEFEIPVQAGMSSFPSSWSRVRIRHLEMHFVKEASGIGGEIIHQPTTQTGTVYILLQGSTIFHDRRRDQVLPFQAAAPLNYHYAYRLDTGDSTLTNEPSEQFANKFMQMTPFTRWRLRLSASAKENAGLAFPTATALDSTTQIVITFHVTAIRQIDWRHDEE

SEQ ID NO: 355 - protein, 867 aa, synthetic construct
  REGION 1..867: note = Synthetic
MALVDYGKLFEDLNQISMGVLDRVEFSEVMVIHRMYVRLADLNVGQLEGAEKVKRLYVFADVVELPVVEWRWPPQIPGSVTVIILCRLLQWPTDGRQSDTELHLTFMKLHAIQREENRWEITAADGMNWGVYIHAEEVQVGVLTMSWSSVLRVSALRSVITSGFRAVSVFEVPGSVRSTLGATLRPDHALYSTTMQATPNASHISAFNLRIVSPSAYRVCPLQNDTDTYLGIPADVAAVLPVDVVTDPNILLGMQTTVHIAELVKACHPSPDVVSAVGEHLNWLNKLLLPLKESTQLQGSESYKECLALLGRVHAAMKMVRIGLVVPQLQYRMYGSLINQMAQVAQNYDREFKQFKLFIIQNQILGSYLLQQNRAFAERELQMESFHAAVISQRREELDNTFAKMDRLSGQMEAESSAMEQAKKEMDEGLRQFQNRQVANALFAVLSAVAQIGLAFLTAGATAPGAVASAGQAVSIAGQAAQGLRRVVEILEQLEAVMEVVAAVKDLVDSLEQVGQIVDAPVMPELPSEADWSIFVNEVEAVAEGMPTEVSEVPVWQVRCKSVAALGREMSITAVQMSELQYDIWVQGMMRDMARSQADRLAAIQPADLTNYLEMATQMDMRTTRMLLGLLNILRIQNAALRYEYLLMPTELTTWPLGMDTVGDLLIAQENAALIGLMQLGPSSDFTSRHVVKDIPVNLLLDGEDWEFEIPVQAGMSSFPSSWSRVRIRHLEMHFVKEASGIGGEIIHQPTTQTGTVYILLQGSTIFHDRRRDQVLPFQAAAPLNYHYAYRLDTGDSTLTNEPSEQFANKFMQMTPFTRWRLRLSASAKENAGLAFPTATALDSTTQIVITFHVTAIRQIDWRHDEE

SEQ ID NO: 356 - protein, 867 aa, synthetic construct
  REGION 1..867: note = Synthetic
MALVDYGKLFEDLNQISMGVLDRVEFSEVMVIHRMYVRLADLNVGQLEGAEKVKRLYVFADVVELPVVEWRWPPQIPGSVTVIILCRLLQWPTDGRQSDTELHLTFMKLHAIQREENRWEITAADGMNWGVYIHAEEVQVGVLTMSWSSVLRVSALRSVITSGFRAVSVFEVPGSVRSTLGATLRPDHALYSTTMQATPNASHISAFNLRIVSPSAYRVCPLQNDTDTYLGIPADVAAVLPVDVVTDPNILLGMQTTVHIAELVKACHPSPDVVSAVGEHLNWLNKLLLPLKESTQLQGSESYKECLALLGRVHAAMKMVRIGLVVPQLQYRMYGSLINQMAQVAQNYDREFKQFKLFIIQNQILGSYLLQQNRAFAERELQMESFHAAVISQRREELDNTFAKMDRLSGQMEAESSAMEQAKKEMDEGLRQFQNRQVANALFAVLSAVAQIGLAFLTAGATAPGAVASAGQAVSIAGQAAQGLRRVVEILEQLEAVMEVVAAVKDLVDSLEQVGQIVDAPVMPELPSEADWSIFVNEVEAVAEGMPTEVSEVPVWRARCKNVAALGREMSIAAVQMSELQYDIWVQGMMRDMARSQADRLAAIQPADLTNYLEMATQMDMRTTRMLLGLLNILRIQNAALRYEYLLMPTELTTWPLGMDTVGDLLIAQENAALIGLMQLGPSSDFTSRHVVKDIPVNLLLDGEDWEFEIPVQAGMSSFPSSWSRVRIRHLEMHFVKEASGIGGEIIHQPTTQTGTVYILLQGSTIFHDRRRDQVLPFQAAAPLNYHYAYRLDTGDSTLTNEPSEQFANKFMQMTPFTRWRLRLSASAKENAGLAFPTATALDSTTQIVITFHVTAIRQIDWRHDEE

SEQ ID NO: 357 - protein, 867 aa, synthetic construct
  REGION 1..867: note = Synthetic
MALVDYGKLFEDLNQISMGVLDRVEFSEVMVIHRMYVRLADLNVGQLEGAEKVKRLYVFADVVELPVVEWRWPPQIPGSVTVIILCRLLQWPTDGRQSDTELHLTFMKLHAIQREENRWEITAADGMNWGVYIHAEEVQVGVLTMSWSSVLRVSALRSVITSGFRAVSVFEVPGSVRSTLGATLRPDHALYSTTMQATPNASHISAFNLRIVSPSAYRVCPLQNDTDTYLGIPADVAAVLPVDVVTDPNILLGMQTTVHIAELVKACHPSPDVVSAVGEHLNWLNKLLLPLKESTQLQGSESYKECLALLGRVHAAMKMVRIGLVVPQLQYRMYGSLINQMAQVAQNYDREFKQFKLFIIQNQILGSYLLQQNRAFAERELQMESFHAAVISQRREELDNTFAKMDRLSGQMEAESSAMEQAKKEMDEGLRQFQNRQVANALFAVLSAVAQIGLAFLTAGATAPGAVASAGQAVSIAGQAAQGLRRVVEILEQLEAVMEVVAAVKDLVDSLEQVGQIVDAPVMPELPSEADWSIFVNEVEAVAEGMPTEVSEVPVWRGKCKSVAALGREMSITAVQMSELQYDIWVQGMMRDMARSQADRLAAIQPADLTNYLEMATQMDMRTTRMLLGLLNILRIQNAALRYEYLLMPTELTTWPLGMDTVGDLLIAQENAALIGLMQLGPSSDFTSRHVVKDIPVNLLLDGEDWEFEIPVQAGMSSFPSSWSRVRIRHLEMHFVKEASGIGGEIIHQPTTQTGTVYILLQGSTIFHDRRRDQVLPFQAAAPLNYHYAYRLDTGDSTLTNEPSEQFANKFMQMTPFTRWRLRLSASAKENAGLAFPTATALDSTTQIVITFHVTAIRQIDWRHDEE

SEQ ID NO: 358 - protein, 867 aa, synthetic construct
  REGION 1..867: note = Synthetic
MALVDYGKLFEDLNQISMGVLDRVEFSEVMVIHRMYVRLADLNVGQLEGAEKVKRLYVFADVVELPVVEWRWPPQIPGSVTVIILCRLLQWPTDGRQSDTELHLTFMKLHAIQREENRWEITAADGMNWGVYIHAEEVQVGVLTMSWSSVLRVSALRSVITSGFRAVSVFEVPGSVRSTLGATLRPDHALYSTTMQATPNASHISAFNLRIVSPSAYRVCPLQNDTDTYLGIPADVAAVLPVDVVTDPNILLGMQTTVHIAELVKACHPSPDVVSAVGEHLNWLNKLLLPLKESTQLQGSESYKECLALLGRVHAAMKMVRIGLVVPQLQYRMYGSLINQMAQVAQNYDREFKQFKLFIIQNQILGSYLLQQNRAFAERELQMESFHAAVISQRREELDNTFAKMDRLSGQMEAESSAMEQAKKEMDEGLRQFQNRQVANALFAVLSAVAQIGLAFLTAGATAPGAVASAGQAVSIAGQAAQGLRRVVEILEQLEAVMEVVAAVKDLVDSLEQVGQIVDAPVMPELPSEADWSIFVNEVEAVAEGMPTEVSEVPVWRGRCKTVAALGREMSITAVQMSELQYDIWVQGMMRDMARSQADRLAAIQPADLTNYLEMATQMDMRTTRMLLGLLNILRIQNAALRYEYLLMPTELTTWPLGMDTVGDLLIAQENAALIGLMQLGPSSDFTSRHVVKDIPVNLLLDGEDWEFEIPVQAGMSSFPSSWSRVRIRHLEMHFVKEASGIGGEIIHQPTTQTGTVYILLQGSTIFHDRRRDQVLPFQAAAPLNYHYAYRLDTGDSTLTNEPSEQFANKFMQMTPFTRWRLRLSASAKENAGLAFPTATALDSTTQIVITFHVTAIRQIDWRHDEE

SEQ ID NO: 359 - protein, 867 aa, synthetic construct
  REGION 1..867: note = Synthetic
MALVDYGKLFEDLNQISMGVLDRVEFSEVMVIHRMYVRLADLNVGQLEGAEKVKRLYVFADVVELPVVEWRWPPQIPGSVTVIILCRLLQWPTDGRQSDTELHLTFMKLHAIQREENRWEITAADGMNWGVYIHAEEVQVGVLTMSWSSVLRVSALRSVITSGFRAVSVFEVPGSVRSTLGATLRPDHALYSTTMQATPNASHISAFNLRIVSPSAYRVCPLQNDTDTYLGIPADVAAVLPVDVVTDPNILLGMQTTVHIAELVKACHPSPDVVSAVGEHLNWLNKLLLPLKESTQLQGSESYKECLALLGRVHAAMKMVRIGLVVPQLQYRMYGSLINQMAQVAQNYDREFKQFKLFIIQNQILGSYLLQQNRAFAERELQMESFHAAVISQRREELDNTFAKMDRLSGQMEAESSAMEQAKKEMDEGLRQFQNRQVANALFAVLSAVAQIGLAFLTAGATAPGAVASAGQAVSIAGQAAQGLRRVVEILEQLEAVMEVVAAVKDLVDSLEQVGQIVDAPVMPELPSEADWSIFVNEVEAVAEGMPTEVSEVPVWSARCKSVAALGREMSITAVQMSELQYDIWVQGMMRDMARSQADRLAAIQPADLTNYLEMATQMDMRTTRMLLGLLNILRIQNAALRYEYLLMPTELTTWPLGMDTVGDLLIAQENAALIGLMQLGPSSDFTSRHVVKDIPVNLLLDGEDWEFEIPVQAGMSSFPSSWSRVRIRHLEMHFVKEASGIGGEIIHQPTTQTGTVYILLQGSTIFHDRRRDQVLPFQAAAPLNYHYAYRLDTGDSTLTNEPSEQFANKFMQMTPFTRWRLRLSASAKENAGLAFPTATALDSTTQIVITFHVTAIRQIDWRHDEE

SEQ ID NO: 360 - protein, 867 aa, synthetic construct
  REGION 1..867: note = Synthetic
MALVDYGKLFEDLNQISMGVLDRVEFSEVMVIHRMYVRLADLNVGQLEGAEKVKRLYVFADVVELPVVEWRWPPQIPGSVTVIILCRLLQWPTDGRQSDTELHLTFMKLHAIQREENRWEITAADGMNWGVYIHAEEVQVGVLTMSWSSVLRVSALRSVITSGFRAVSVFEVPGSVRSTLGATLRPDHALYSTTMQATPNASHISAFNLRIVSPSAYRVCPLQNDTDTYLGIPADVAAVLPVDVVTDPNILLGMQTTVHIAELVKACHPSPDVVSAVGEHLNWLNKLLLPLKESTQLQGSESYKECLALLGRVHAAMKMVRIGLVVPQLQYRMYGSLINQMAQVAQNYDREFKQFKLFIIQNQILGSYLLQQNRAFAERELQMESFHAAVISQRREELDNTFAKMDRLSGQMEAESSAMEQAKKEMDEGLRQFQNRQVANALFAVLSAVAQIGLAFLTAGATAPGAVASAGQAVSIAGQAAQGLRRVVEILEQLEAVMEVVAAVKDLVDSLEQVGQIVDAPVMPELPSEADWSIFVNEVEAVAEGMPTEVSEVPVWSVKCKHVAALGREMSITAVQMSELQYDIWVQGMMRDMARSQADRLAAIQPADLTNYLEMATQMDMRTTRMLLGLLNILRIQNAALRYEYLLMPTELTTWPLGMDTVGDLLIAQENAALIGLMQLGPSSDFTSRHVVKDIPVNLLLDGEDWEFEIPVQAGMSSFPSSWSRVRIRHLEMHFVKEASGIGGEIIHQPTTQTGTVYILLQGSTIFHDRRRDQVLPFQAAAPLNYHYAYRLDTGDSTLTNEPSEQFANKFMQMTPFTRWRLRLSASAKENAGLAFPTATALDSTTQIVITFHVTAIRQIDWRHDEE

SEQ ID NO: 361 - protein, 867 aa, synthetic construct
  REGION 1..867: note = Synthetic
MALVDYGKLFEDLNQISMGVLDRVEFSEVMVIHRMYVRLADLNVGQLEGAEKVKRLYVFADVVELPVVEWRWPPQIPGSVTVIILCRLLQWPTDGRQSDTELHLTFMKLHAIQREENRWEITAADGMNWGVYIHAEEVQVGVLTMSWSSVLRVSALRSVITSGFRAVSVFEVPGSVRSTLGATLRPDHALYSTTMQATPNASHISAFNLRIVSPSAYRVCPLQNDTDTYLGIPADVAAVLPVDVVTDPNILLGMQTTVHIAELVKACHPSPDVVSAVGEHLNWLNKLLLPLKESTQLQGSESYKECLALLGRVHAAMKMVRIGLVVPQLQYRMYGSLINQMAQVAQNYDREFKQFKLFIIQNQILGSYLLQQNRAFAERELQMESFHAAVISQRREELDNTFAKMDRLSGQMEAESSAMEQAKKEMDEGLRQFQNRQVANALFAVLSAVAQIGLAFLTAGATAPGAVASAGQAVSIAGQAAQGLRRVVEILEQLEAVMEVVAAVKDLVDSLEQVGQIVDAPVMPELPSEADWSIFVNEVEAVAEGMPTEVSEVPVWTGRCKTVAALGREMSITAVQMSELQYDIWVQGMMRDMARSQADRLAAIQPADLTNYLEMATQMDMRTTRMLLGLLNILRIQNAALRYEYLLMPTELTTWPLGMDTVGDLLIAQENAALIGLMQLGPSSDFTSRHVVKDIPVNLLLDGEDWEFEIPVQAGMSSFPSSWSRVRIRHLEMHFVKEASGIGGEIIHQPTTQTGTVYILLQGSTIFHDRRRDQVLPFQAAAPLNYHYAYRLDTGDSTLTNEPSEQFANKFMQMTPFTRWRLRLSASAKENAGLAFPTATALDSTTQIVITFHVTAIRQIDWRHDEE

SEQ ID NO: 362 - protein, 867 aa, synthetic construct
  REGION 1..867: note = Synthetic
MALVDYGKLFEDLNQISMGVLDRVEFSEVMVIHRMYVRLADLNVGQLEGAEKVKRLYVFADVVELPVVEWRWPPQIPGSVTVIILCRLLQWPTDGRQSDTELHLTFMKLHAIQREENRWEITAADGMNWGVYIHAEEVQVGVLTMSWSSVLRVSALRSVITSGFRAVSVFEVPGSVRSTLGATLRPDHALYSTTMQATPNASHISAFNLRIVSPSAYRVCPLQNDTDTYLGIPADVAAVLPVDVVTDPNILLGMQTTVHIAELVKACHPSPDVVSAVGEHLNWLNKLLLPLKESTQLQGSESYKECLALLGRVHAAMKMVRIGLVVPQLQYRMYGSLINQMAQVAQNYDREFKQFKLFIIQNQILGSYLLQQNRAFAERELQMESFHAAVISQRREELDNTFAKMDRLSGQMEAESSAMEQAKKEMDEGLRQFQNRQVANALFAVLSAVAQIGLAFLTAGATAPGAVASAGQAVSIAGQAAQGLRRVVEILEQLEAVMEVVAAVKDLVDSLEQVGQIVDAPVMPELPSEADWSIFVNEVEAVAEGMPTEVSEVPVWTGRCNHVAALGQEMSITAVQMSELQYDIWVQGMMRDMARSQADRLAAIQPADLTNYLEMATQMDMRTTRMLLGLLNILRIQNAALRYEYLLMPTELTTWPLGMDTVGDLLIAQENAALIGLMQLGPSSDFTSRHVVKDIPVNLLLDGEDWEFEIPVQAGMSSFPSSWSRVRIRHLEMHFVKEASGIGGEIIHQPTTQTGTVYILLQGSTIFHDRRRDQVLPFQAAAPLNYHYAYRLDTGDSTLTNEPSEQFANKFMQMTPFTRWRLRLSASAKENAGLAFPTATALDSTTQIVITFHVTAIRQIDWRHDEE

SEQ ID NO: 363 - protein, 867 aa, synthetic construct
  REGION 1..867: note = Synthetic
MALVDYGKLFEDLNQISMGVLDRVEFSEVMVIHRMYVRLADLNVGQLEGAEKVKRLYVFADVVELPVVEWRWPPQIPGSVTVIILCRLLQWPTDGRQSDTELHLTFMKLHAIQREENRWEITAADGMNWGVYIHAEEVQVGVLTMSWSSVLRVSALRSVITSGFRAVSVFEVPGSVRSTLGATLRPDHALYSTTMQATPNASHISAFNLRIVSPSAYRVCPLQNDTDTYLGIPADVAAVLPVDVVTDPNILLGMQTTVHIAELVKACHPSPDVVSAVGEHLNWLNKLLLPLKESTQLQGSESYKECLALLGRVHAAMKMVRIGLVVPQLQYRMYGSLINQMAQVAQNYDREFKQFKLFIIQNQILGSYLLQQNRAFAERELQMESFHAAVISQRREELDNTFAKMDRLSGQMEAESSAMEQAKKEMDEGLRQFQNRQVANALFAVLSAVAQIGLAFLTAGATAPGAVASAGQAVSIAGQAAQGLRRVVEILEQLEAVMEVVAAVKDLVDSLEQVGQIVDAPVMPELPSEADWSIFVNEVEAVAEGMPTEVSEVPVWTVKCKNVAALGREMSITAVQMSELQYDIWVQGMMRDMARSQADRLAAIQPADLTNYLEMATQMDMRTTRMLLGLLNILRIQNAALRYEYLLMPTELTTWPLGMDTVGDLLIAQENAALIGLMQLGPSSDFTSRHVVKDIPVNLLLDGEDWEFEIPVQAGMSSFPSSWSRVRIRHLEMHFVKEASGIGGEIIHQPTTQTGTVYILLQGSTIFHDRRRDQVLPFQAAAPLNYHYAYRLDTGDSTLTNEPSEQFANKFMQMTPFTRWRLRLSASAKENAGLAFPTATALDSTTQIVITFHVTAIRQIDWRHDEE

SEQ ID NO: 364 - protein, 867 aa, synthetic construct
  REGION 1..867: note = Synthetic
MALVDYGKLFEDLNQISMGVLDRVEFSEVMVIHRMYVRLADLNVGQLEGAEKVKRLYVFADVVELPVVEWRWPPQIPGSVTVIILCRLLQWPTDGRQSDTELHLTFMKLHAIQREENRWEITAADGMNWGVYIHAEEVQVGVLTMSWSSVLRVSALRSVITSGFRAVSVFEVPGSVRSTLGATLRPDHALYSTTMQATPNASHISAFNLRIVSPSAYRVCPLQNDTDTYLGIPADVAAVLPVDVVTDPNILLGMQTTVHIAELVKACHPSPDVVSAVGEHLNWLNKLLLPLKESTQLQGSESYKECLALLGRVHAAMKMVRIGLVVPQLQYRMYGSLINQMAQVAQNYDREFKQFKLFIIQNQILGSYLLQQNRAFAERELQMESFHAAVISQRREELDNTFAKMDRLSGQMEAESSAMEQAKKEMDEGLRQFQNRQVANALFAVLSAVAQIGLAFLTAGATAPGAVASAGQAVSIAGQAAQGLRRVVEILEQLEAVMEVVAAVKDLVDSLEQVGQIVDAPVMPELPSEADWSIFVNEVEAVAEGMPTEVSEVPVWTVKCKSVAALGREMSITAVQMSELQYDIWVQGMMRDMARSQADRLAAIQPADLTNYLEMATQMDMRTTRMLLGLLNILRIQNAALRYEYLLMPTELTTWPLGMDTVGDLLIAQENAALIGLMQLGPSSDFTSRHVVKDIPVNLLLDGEDWEFEIPVQAGMSSFPSSWSRVRIRHLEMHFVKEASGIGGEIIHQPTTQTGTVYILLQGSTIFHDRRRDQVLPFQAAAPLNYHYAYRLDTGDSTLTNEPSEQFANKFMQMTPFTRWRLRLSASAKENAGLAFPTATALDSTTQIVITFHVTAIRQIDWRHDEE

SEQ ID NO: 365 - protein, 867 aa, synthetic construct
  REGION 1..867: note = Synthetic
MALVDYGKLFEDLNQISMGVLDRVEFSEVMVIHRMYVRLADLNVGQLEGAEKVKRLYVFADVVELPVVEWRWPPQIPGSVTVIILCRLLQWPTDGRQSDTELHLTFMKLHAIQREENRWEITAADGMNWGVYIHAEEVQVGVLTMSWSSVLRVSALRSVITSGFRAVSVFEVPGSVRSTLGATLRPDHALYSTTMQATPNASHISAFNLRIVSPSAYRVCPLQNDTDTYLGIPADVAAVLPVDVVTDPNILLGMQTTVHIAELVKACHPSPDVVSAVGEHLNWLNKLLLPLKESTQLQGSESYKECLALLGRVHAAMKMVRIGLVVPQLQYRMYGSLINQMAQVAQNYDREFKQFKLFIIQNQILGSYLLQQNRAFAERELQMESFHAAVISQRREELDNTFAKMDRLSGQMEAESSAMEQAKKEMDEGLRQFQNRQVANALFAVLSAVAQIGLAFLTAGATAPGAVASAGQAVSIAGQAAQGLRRVVEILEQLEAVMEVVAAVKDLVDSLEQVGQIVDAPVMPELPSEADWSIFVNEVEAVAEGMPTEVSEVPVWTVRCKNVAALGREMSITAVQMSELQYDIWVQGMMRDMARSQADRLAAIQPADLTNYLEMATQMDMRTTRMLLGLLNILRIQNAALRYEYLLMPTELTTWPLGMDTVGDLLIAQENAALIGLMQLGPSSDFTSRHVVKDIPVNLLLDGEDWEFEIPVQAGMSSFPSSWSRVRIRHLEMHFVKEASGIGGEIIHQPTTQTGTVYILLQGSTIFHDRRRDQVLPFQAAAPLNYHYAYRLDTGDSTLTNEPSEQFANKFMQMTPFTRWRLRLSASAKENAGLAFPTATALDSTTQIVITFHVTAIRQIDWRHDEE

SEQ ID NO: 366 - protein, 867 aa, synthetic construct
  REGION 1..867: note = Synthetic
MALVDYGKLFEDLNQISMGVLDRVEFSEVMVIHRMYVRLADLNVGQLEGAEKVKRLYVFADVVELPVVEWRWPPQIPGSVTVIILCRLLQWPTDGRQSDTELHLTFMKLHAIQREENRWEITAADGMNWGVYIHAEEVQVGVLTMSWSSVLRVSALRSVITSGFRAVSVFEVPGSVRSTLGATLRPDHALYSTTMQATPNASHISAFNLRIVSPSAYRVCPLQNDTDTYLGIPADVAAVLPVDVVTDPNILLGMQTTVHIAELVKACHPSPDVVSAVGEHLNWLNKLLLPLKESTQLQGSESYKECLALLGRVHAAMKMVRIGLVVPQLQYRMYGSLINQMAQVAQNYDREFKQFKLFIIQNQILGSYLLQQNRAFAERELQMESFHAAVISQRREELDNTFAKMDRLSGQMEAESSAMEQAKKEMDEGLRQFQNRQVANALFAVLSAVAQIGLAFLTAGATAPGAVASAGQAVSIAGQAAQGLRRVVEILEQLEAVMEVVAAVKDLVDSLEQVGQIVDAPVMPELPSEADWSIFVNEVEAVAEGMPTEVSEVPVWRARCKHVAALGREMSITAVQMSELQYDIWVQGMMRDMARSQADRLAAIQPADLTNYLEMATQMDMRTTRMLLGLLNILRIQNAALRYEYLLMPTELTTWPLGMDTVGDLLIAQENAALIGLMQLGPSSDFTSRHVVKDIPVNLLLDGEDWEFEIPVQAGMSSFPSSWSRVRIRHLEMHFVKEASGIGGEIIHQPTTQTGTVYILLQGSTIFHDRRRDQVLPFQAAAPLNYHYAYRLDTGDSTLTNEPSEQFANKFMQMTPFTRWRLRLSASAKENAGLAFPTATALDSTTQIVITFHVTAIRQIDWRHDEE

SEQ ID NO: 367 - protein, 867 aa, synthetic construct
  REGION 1..867: note = Synthetic
MALVDYGKLFEDLNQISMGVLDRVEFSEVMVIHRMYVRLADLNVGQLEGAEKVKRLYVFADVVELPVVEWRWPPQIPGSVTVIILCRLLQWPTDGRQSDTELHLTFMKLHAIQREENRWEITAADGMNWGVYIHAEEVQVGVLTMSWSSVLRVSALRSVITSGFRAVSVFEVPGSVRSTLGATLRPDHALYSTTMQATPNASHISAFNLRIVSPSAYRVCPLQNDTDTYLGIPADVAAVLPVDVVTDPNILLGMQTTVHIAELVKACHPSPDVVSAVGEHLNWLNKLLLPLKESTQLQGSESYKECLALLGRVHAAMKMVRIGLVVPQLQYRMYGSLINQMAQVAQNYDREFKQFKLFIIQNQILGSYLLQQNRAFAERELQMESFHAAVISQRREELDNTFAKMDRLSGQMEAESSAMEQAKKEMDEGLRQFQNRQVANALFAVLSAVAQIGLAFLTAGATAPGAVASAGQAVSIAGQAAQGLRRVVEILEQLEAVMEVVAAVKDLVDSLEQVGQIVDAPVMPELPSEADWSIFVNEVEAVAEGMPTEVSEVPVWIGRCKSVAALGREMSITAVQMSELQYDIWVQGMMRDMARSQADRLAAIQPADLTNYLEMATQMDMRTTRMLLGLLNILRIQNAALRYEYLLMPTELTTWPLGMDTVGDLLIAQENAALIGLMQLGPSSDFTSRHVVKDIPVNLLLDGEDWEFEIPVQAGMSSFPSSWSRVRIRHLEMHFVKEASGIGGEIIHQPTTQTGTVYILLQGSTIFHDRRRDQVLPFQAAAPLNYHYAYRLDTGDSTLTNEPSEQFANKFMQMTPFTRWRLRLSASAKENAGLAFPTATALDSTTQIVITFHVTAIRQIDWRHDEE

SEQ ID NO: 368 - DNA, 2601 bp, synthetic construct
  misc_feature 1..2601: note = Synthetic
  source 1..2601: mol_type = other DNA
atggctctcgtggattacggcaagcttttcgaggatctgaaccagataagcatgggtgtactggatcgggtagagttttcagaggtgatggtgatccacaggatgtatgtgaggctagctgatctgaatgtggggcagctcgagggagccgagaaagtgaagcacttgtatatttttaccgacgttctcgagctaccagtcgtggaatggcggtggccgccgcaaataccaggatcggtgacggtgatcatattgtgtcgtcttcttcaatggccaactgatgggaggcagtcggacaccgagctccacctgacattcatgaagttgcatgccatacaacgagaggaaaatcggtgggagataaccgcagcagatggcatgaactggggagtttacatacacgcagaggaagtacaggttggcgtgctgacaatgtcatggtcttcggtacttagagtttcggcacttcgctctgttataacctccggctttcgcgccgttagtgtgtttgaggtaccgggaagtgtaaggtccacccttggagctactttaaggcccgatcacgccttatatagtacaactatgcaagccacacccaacgcatcgcatattagtgcttttaaccttcgcatagtttccccgtcggcatatcgtgtttgtcctctccaaaatgacacagatacctacttaggtattccagcagacgtggcggcagttcttccagtagacgtggtgactgatcctaacatcttgctgggcatgcagacaacggtacacattgcggagctagtcaaggcatgtcatccgtcacccgatgttgtgagcgctgtaggggagcacctgaactggctcaacaaactcttactcccacttaaggaatcgactcagttgcaaggaagcgagtcgtacaaggagtgccttgcactcttgggtcgtgttcacgctgcgatgaagatggtgagaattggcttagtagtgccccagctgcaatacagaatgtacggtagcctcatcaaccaaatggcccaagtagcacaaaactacgaccgagaattcaagcaattcaaattattcatcatccaaaatcaaatccttggcagctatttgctgcagcagaacagggcatttgctgagagggagctgcagatggagagctttcatgctgctgtcatttctcaaagaagggaggagttggacaatacattcgcaaagatggaccgattgagcgggcaaatggaggcagagagtagtgcaatggagcaagccaaaaaggaaatggacgaaggattgaggcagttccagaataggcaagttgcgaacgccctctttgccgttcttagcgctgtagctcagattgggcttgcattccttacggctggtgcaacggctcctggagctgtggcgtcggcggggcaagctgtgagcatagcaggtcaggcggcgcaaggtctgcgaagggtggtggaaattctagagcagctggaggctgtgatggaggttgtggctgctgtgaaggacctcgtggattcattggaacaggtaggtcagattgtggacgcaccggtgatgccggaattgccctcagaggcggactggttcatttttgtgaacgaggtggaggccgtggcagagggcatgccaacggaagtctcggaggttccggtgtggcacggcaagtgcaagaatgtggctgcactgggtcgggagatgagcatcacggcagtacagatgtcggagctgcagtatgacatctgggtgcaaggcatgatgcgggatatggctcgaagccaggcagacaggctggccgcaattcaacccgcggaccttaccaactatttggagatggctacccagatggatatgcggactacgaggatgctgctggggctcctcaacatattgcgcatccagaatgcggcgctcaggtacgagtatcttctaatgcccacggagctcacaacatggccactgggtatggataccgtgggtgacttgctcatcgcgcaggagaatgctgcactgataggattaatgcagctagggccctcatctgatttcacgagcaggcatgtggtgaaagacatacctgtgaacttgctgctcgatggcgaggattgggagtttgagattcctgtgcaagctggcatgtccagcttcccttccagctggtctcgcgtccgtattcggcacctggagatgcactttgtgaaggaggccagcggtattggtggtgagattatccaccagcctaccacccagactgggaccgtttacatccttctgcagggttccactatcttccatgaccgcagaagagaccaggtgttgccttttcaggccgctgctccgctcaactaccattacgcgtaccgcctcgacaccggcgactccactctcacaaacgaaccctctgaacagtttgccaacaagttcatgcagatgacacccttcacccgttggaggcttcgtctgtctgcgtccgcaaaagagaatgcaggattagcctttcccacggctacagcacttgactccactacccagattgtcatcactttccatgttacggccatcagacaaattgactggcggcacgacgaagag

SEQ ID NO: 369 - DNA, 2601 bp, synthetic construct
  misc_feature 1..2601: note = Synthetic
  source 1..2601: mol_type = other DNA
atggctctcgtggattacggcaagcttttcgaggatctgaaccagataagcatgggtgtactggatcgggtagagttttcagaggtgatggtgatccacaggatgtatgtgaggctagctgatctgaatgtggggcagctcgagggagccgagaaagtgaagcacttgtatatttttaccgacgttctcgagctaccagtcgtggaatggcggtggccgccgcaaataccaggatcggtgacggtgatcatattgtgtcgtcttcttcaatggccaactgatgggaggcagtcggacaccgagctccacctgacattcatgaagttgcatgccatacaacgagaggaaaatcggtgggagataaccgcagcagatggcatgaactggggagtttacatacacgcagaggaagtacaggttggcgtgctgacaatgtcatggtcttcggtacttagagtttcggcacttcgctctgttataacctccggctttcgcgccgttagtgtgtttgaggtaccgggaagtgtaaggtccacccttggagctactttaaggcccgatcacgccttatatagtacaactatgcaagccacacccaacgcatcgcatattagtgcttttaaccttcgcatagtttccccgtcggcatatcgtgtttgtcctctccaaaatgacacagatacctacttaggtattccagcagacgtggcggcagttcttccagtagacgtggtgactgatcctaacatcttgctgggcatgcagacaacggtacacattgcggagctagtcaaggcatgtcatccgtcacccgatgttgtgagcgctgtaggggagcacctgaactggctcaacaaactcttactcccacttaaggaatcgactcagttgcaaggaagcgagtcgtacaaggagtgccttgcactcttgggtcgtgttcacgctgcgatgaagatggtgagaattggcttagtagtgccccagctgcaatacagaatgtacggtagcctcatcaaccaaatggcccaagtagcacaaaactacgaccgagaattcaagcaattcaaattattcatcatccaaaatcaaatccttggcagctatttgctgcagcagaacagggcatttgctgagagggagctgcagatggagagctttcatgctgctgtcatttctcaaagaagggaggagttggacaatacattcgcaaagatggaccgattgagcgggcaaatggaggcagagagtagtgcaatggagcaagccaaaaaggaaatggacgaaggattgaggcagttccagaataggcaagttgcgaacgccctctttgccgttcttagcgctgtagctcagattgggcttgcattccttacggctggtgcaacggctcctggagctgtggcgtcggcggggcaagctgtgagcatagcaggtcaggcggcgcaaggtctgcgaagggtggtggaaattctagagcagctggaggctgtgatggaggttgtggctgctgtgaaggacctcgtggattcattggaacaggtaggtcagattgtggacgcaccggtgatgccggaattgccctcagaggcggactggtccatttttgtgaacgaggtggaggccgtggcagagggcatgccaacggaagtctcggaggttccggtgtggctggccaggtgcaagaatgtggctgcactgggtcgggagatgagcatcacggcagtacagatgtcggagctgcagtatgacatctgggtgcaaggcatgatgcgggatatggctcgaagccaggcagacaggctggccgcaattcaacccgcggaccttaccaactatttggagatggctacccagatggatatgcggactacgaggatgctgctggggctcctcaacatattgcgcatccagaatgcggcgctcaggtacgagtatcttctaatgcccacggagctcacaacatggccactgggtatggataccgtgggtgacttgctcatcgcgcaggagaatgctgcactgataggattaatgcagctagggccctcatctgatttcacgagcaggcatgtggtgaaagacatacctgtgaacttgctgctcgatggcgaggattgggagtttgagattcctgtgcaagctggcatgtccagcttcccttccagctggtctcgcgtccgtattcggcacctggagatgcactttgtgaaggaggccagcggtattggtggtgagattatccaccagcctaccacccagactgggaccgtttacatccttctgcagggttccactatcttccatgaccgcagaagagaccaggtgttgccttttcaggccgctgctccgctcaactaccattacgcgtaccgcctcgacaccggcgactccactctcacaaacgaaccctctgaacagtttgccaacaagttcatgcagatgacacccttcacccgttggaggcttcgtctgtctgcgtccgcaaaagagaatgcaggattagcctttcccacggctacagcacttgactccactacccagattgtcatcactttccatgttacggccatcagacaaattgactggcggcacgacgaagag

SEQ ID NO: 370 - DNA, 2601 bp, synthetic construct
  misc_feature 1..2601: note = Synthetic
  source 1..2601: mol_type = other DNA
atggctctcgtggattacggcaagcttttcgaggatctgaaccagataagcatgggtgtactggatcgggtagagttttcagaggtgatggtgatccacaggatgtatgtgaggctagctgatctgaatgtggggcagctcgagggagccgagaaagtgaagcacttgtatatttttaccgacgttctcgagctaccagtcgtggaatggcggtggccgccgcaaataccaggatcggtgacggtgatcatattgtgtcgtcttcttcaatggccaactgatgggaggcagtcggacaccgagctccacctgacattcatgaagttgcatgccatacaacgagaggaaaatcggtgggagataaccgcagcagatggcatgaactggggagtttacatacacgcagaggaagtacaggttggcgtgctgacaatgtcatggtcttcggtacttagagtttcggcacttcgctctgttataacctccggctttcgcgccgttagtgtgtttgaggtaccgggaagtgtaaggtccacccttggagctactttaaggcccgatcacgccttatatagtacaactatgcaagccacacccaacgcatcgcatattagtgcttttaaccttcgcatagtttccccgtcggcatatcgtgtttgtcctctccaaaatgacacagatacctacttaggtattccagcagacgtggcggcagttcttccagtagacgtggtgactgatcctaacatcttgctgggcatgcagacaacggtacacattgcggagctagtcaaggcatgtcatccgtcacccgatgttgtgagcgctgtaggggagcacctgaactggctcaacaaactcttactcccacttaaggaatcgactcagttgcaaggaagcgagtcgtacaaggagtgccttgcactcttgggtcgtgttcacgctgcgatgaagatggtgagaattggcttagtagtgccccagctgcaatacagaatgtacggtagcctcatcaaccaaatggcccaagtagcacaaaactacgaccgagaattcaagcaattcaaattattcatcatccaaaatcaaatccttggcagctatttgctgcagcagaacagggcatttgctgagagggagctgcagatggagagctttcatgctgctgtcatttctcaaagaagggaggagttggacaatacattcgcaaagatggaccgattgagcgggcaaatggaggcagagagtagtgcaatggagcaagccaaaaaggaaatggacgaaggattgaggcagttccagaataggcaagttgcgaacgccctctttgccgttcttagcgctgtagctcagattgggcttgcattccttacggctggtgcaacggctcctggagctgtggcgtcggcggggcaagctgtgagcatagcaggtcaggcggcgcaaggtctgcgaagggtggtggaaattctagagcagctggaggctgtgatggaggttgtggctgctgtgaaggacctcgtggattcattggaacaggtaggtcagattgtggacgcaccggtgatgccggaattgccctcagaggcggactggtccatttttgtgaacgaggtggaggccgtggcagagggcatgccaacggaagtctcggaggttccggtgtggcaggccaggtgcaagcatgtggctgcactgggtcgggagatgagcatcacggcagtacagatgtcggagctgcagtatgacatctgggtgcaaggcatgatgcgggatatggctcgaagccaggcagacaggctggccgcaattcaacccgcggaccttaccaactatttggagatggctacccagatggatatgcggactacgaggatgctgctggggctcctcaacatattgcgcatccagaatgcggcgctcaggtacgagtatcttctaatgcccacggagctcacaacatggccactgggtatggataccgtgggtgacttgctcatcgcgcaggagaatgctgcactgataggattaatgcagctagggccctcatctgatttcacgagcaggcatgtggtgaaagacatacctgtgaacttgctgctcgatggcgaggattgggagtttgagattcctgtgcaagctggcatgtccagcttcccttccagctggtctcgcgtccgtattcggcacctggagatgcactttgtgaaggaggccagcggtattggtggtgagattatccaccagcctaccacccagactgggaccgtttacatccttctgcagggttccactatcttccatgaccgcagaagagaccaggtgttgccttttcaggccgctgctccgctcaactaccattacgcgtaccgcctcgacaccggcgactccactctcacaaacgaaccctctgaacagtttgccaacaagttcatgcagatgacacccttcacccgttggaggcttcgtctgtctgcgtccgcaaaagagaatgcaggattagcctttcccacggctacagcacttgactccactacccagattgtcatcactttccatgttacggccatcagacaaattgactggcggcacgacgaagag

SEQ ID NO: 371 - DNA, 2601 bp, synthetic construct
  misc_feature 1..2601: note = Synthetic
  source 1..2601: mol_type = other DNA
atggctctcgtggattacggcaagcttttcgaggatctgaaccagataagcatgggtgtactggatcgggtagagttttcagaggtgatggtgatccacaggatgtatgtgaggctagctgatctgaatgtggggcagctcgagggagccgagaaagtgaagcacttgtatgtttttgccgacgttatcgagctaccagtcgtggaatggcggtggccgccgcaaataccaggatcggtgacggtgatcatattgtgtcgtcttcttcaatggccaactgatgggaggcagtcggacaccgagctccacctgacattcatgaagttgcatgccatacaacgagaggaaaatcggtgggagataaccgcagcagatggcatgaactggggagtttacatacacgcagaggaagtacaggttggcgtgctgacaatgtcatggtcttcggtacttagagtttcggcacttcgctctgttataacctccggctttcgcgccgttagtgtgtttgaggtaccgggaagtgtaaggtccacccttggagctactttaaggcccgatcacgccttatatagtacaactatgcaagccacacccaacgcatcgcatattagtgcttttaaccttcgcatagtttccccgtcggcatatcgtgtttgtcctctccaaaatgacacagatacctacttaggtattccagcagacgtggcggcagttcttccagtagacgtggtgactgatcctaacatcttgctgggcatgcagacaacggtacacattgcggagctagtcaaggcatgtcatccgtcacccgatgttgtgagcgctgtaggggagcacctgaactggctcaacaaactcttactcccacttaaggaatcgactcagttgcaaggaagcgagtcgtacaaggagtgccttgcactcttgggtcgtgttcacgctgcgatgaagatggtgagaattggcttagtagtgccccagctgcaatacagaatgtacggtagcctcatcaaccaaatggcccaagtagcacaaaactacgaccgagaattcaagcaattcaaattattcatcatccaaaatcaaatccttggcagctatttgctgcagcagaacagggcatttgctgagagggagctgcagatggagagctttcatgctgctgtcatttctcaaagaagggaggagttggacaatacattcgcaaagatggaccgattgagcgggcaaatggaggcagagagtagtgcaatggagcaagccaaaaaggaaatggacgaaggattgaggcagttccagaataggcaagttgcgaacgccctctttgccgttcttagcgctgtagctcagattgggcttgcattccttacggctggtgcaacggctcctggagctgtggcgtcggcggggcaagctgtgagcatagcaggtcaggcggcgcaaggtctgcgaagggtggtggaaattctagagcagctggaggctgtgatggaggttgtggctgctgtgaaggacctcgtggattcattggaacaggtaggtcagattgtggacgcaccggtgatgccggaattgccctcagaggcggactggtccatttttgtgaacgaggtggaggccgtggcagagggcatgccaacggaagtctcggaggttccggtgtggcaggccaggtgcaagcatgtggctgcactgggtcgggagatgagcatcacggcagtacagatgtcggagctgcagtatgacatctgggtgcaaggcatgatgcgggatatggctcgaagccaggcagacaggctggccgcaattcaacccgcggaccttaccaactatttggagatggctacccagatggatatgcggactacgaggatgctgctggggctcctcaacatattgcgcatccagaatgcggcgctcaggtacgagtatcttctaatgcccacggagctcacaacatggccactgggtatggataccgtgggtgacttgctcatcgcgcaggagaatgctgcactgataggattaatgcagctagggccctcatctgatttcacgagcaggcatgtggtgaaagacatacctgtgaacttgctgctcgatggcgaggattgggagtttgagattcctgtgcaagctggcatgtccagcttcccttccagctggtctcgcgtccgtattcggcacctggagatgcactttgtgaaggaggccagcggtattggtggtgagattatccaccagcctaccacccagactgggaccgtttacatccttctgcagggttccactatcttccatgaccgcagaagagaccaggtgttgccttttcaggccgctgctccgctcaactaccattacgcgtaccgcctcgacaccggcgactccactctcacaaacgaaccctctgaacagtttgccaacaagttcatgcagatgacacccttcacccgttggaggcttcgtctgtctgcgtccgcaaaagagaatgcaggattagcctttcccacggctacagcacttgactccactacccagattgtcatcactttccatgttacggccatcagacaaattgactggcggcacgacgaagag

SEQ ID NO: 372 - DNA, 2601 bp, synthetic construct
  misc_feature 1..2601: note = Synthetic
  source 1..2601: mol_type = other DNA
atggctctcgtggattacggcaagcttttcgaggatctgaaccagataagcatgggtgtactggatcgggtagagttttcagaggtgatggtgatccacaggatgtatgtgaggctagctgatctgaatgtggggcagctcgagggagccgagaaagtgaagcacttgtatgtttttgccgacgttatcgagctaccagtcgtggaatggcggtggccgccgcaaataccaggatcggtgacggtgatcatattgtgtcgtcttcttcaatggccaactgatgggaggcagtcggacaccgagctccacctgacattcatgaagttgcatgccatacaacgagaggaaaatcggtgggagataaccgcagcagatggcatgaactggggagtttacatacacgcagaggaagtacaggttggcgtgctgacaatgtcatggtcttcggtacttagagtttcggcacttcgctctgttataacctccggctttcgcgccgttagtgtgtttgaggtaccgggaagtgtaaggtccacccttggagctactttaaggcccgatcacgccttatatagtacaactatgcaagccacacccaacgcatcgcatattagtgcttttaaccttcgcatagtttccccgtcggcatatcgtgtttgtcctctccaaaatgacacagatacctacttaggtattccagcagacgtggcggcagttcttccagtagacgtggtgactgatcctaacatcttgctgggcatgcagacaacggtacacattgcggagctagtcaaggcatgtcatccgtcacccgatgttgtgagcgctgtaggggagcacctgaactggctcaacaaactcttactcccacttaaggaatcgactcagttgcaaggaagcgagtcgtacaaggagtgccttgcactcttgggtcgtgttcacgctgcgatgaagatggtgagaattggcttagtagtgccccagctgcaatacagaatgtacggtagcctcatcaaccaaatggcccaagtagcacaaaactacgaccgagaattcaagcaattcaaattattcatcatccaaaatcaaatccttggcagctatttgctgcagcagaacagggcatttgctgagagggagctgcagatggagagctttcatgctgctgtcatttctcaaagaagggaggagttggacaatacattcgcaaagatggaccgattgagcgggcaaatggaggcagagagtagtgcaatggagcaagccaaaaaggaaatggacgaaggattgaggcagttccagaataggcaagttgcgaacgccctctttgccgttcttagcgctgtagctcagattgggcttgcattccttacggctggtgcaacggctcctggagctgtggcgtcggcggggcaagctgtgagcatagcaggtcaggcggcgcaaggtctgcgaagggtggtggaaattctagagcagctggaggctgtgatggaggttgtggctgctgtgaaggacctcgtggattcattggaacaggtaggtcagattgtggacgcaccggtgatgccggaattgccctcagaggcggactggtccatttttgtgaacgaggtggaggccgtggcagagggcatgccaacggaagtctcggaggttccggtgtggagggccaggtgcaagaatgtggctgcactgggtcgggagatgagcatcacggcagtacagatgtcggagctgcagtatgacatctgggtgcaaggcatgatgcgggatatggctcgaagccaggcagacaggctggccgcaattcaacccgcggaccttaccaactatttggagatggctacccagatggatatgcggactacgaggatgctgctggggctcctcaacatattgcgcatccagaatgcggcgctcaggtacgagtatcttctaatgcccacggagctcacaacatggccactgggtatggataccgtgggtgacttgctcatcgcgcaggagaatgctgcactgataggattaatgcagctagggccctcatctgatttcacgagcaggcatgtggtgaaagacatacctgtgaacttgctgctcgatggcgaggattgggagtttgagattcctgtgcaagctggcatgtccagcttcccttccagctggtctcgcgtccgtattcggcacctggagatgcactttgtgaaggaggccagcggtattggtggtgagattatccaccagcctaccacccagactgggaccgtttacatccttctgcagggttccactatcttccatgaccgcagaagagaccaggtgttgccttttcaggccgctgctccgctcaactaccattacgcgtaccgcctcgacaccggcgactccactctcacaaacgaaccctctgaacagtttgccaacaagttcatgcagatgacacccttcacccgttggaggcttcgtctgtctgcgtccgcaaaagagaatgcaggattagcctttcccacggctacagcacttgactccactacccagattgtcatcactttccatgttacggccatcagacaaattgactggcggcacgacgaagag

SEQ ID NO: 373 - DNA, 2601 bp, synthetic construct
  misc_feature 1..2601: note = Synthetic
  source 1..2601: mol_type = other DNA
atggctctcgtggattacggcaagcttttcgaggatctgaaccagataagcatgggtgtactggatcgggtagagttttcagaggtgatggtgatccacaggatgtatgtgaggctagctgatctgaatgtggggcagctcgagggagccgagaaagtgaagcagttgtatattttttgcgacgttctcgagctaccagtcgtggaatggcggtggccgccgcaaataccaggatcggtgacggtgatcatattgtgtcgtcttcttcaatggccaactgatgggaggcagtcggacaccgagctccacctgacattcatgaagttgcatgccatacaacgagaggaaaatcggtgggagataaccgcagcagatggcatgaactggggagtttacatacacgcagaggaagtacaggttggcgtgctgacaatgtcatggtcttcggtacttagagtttcggcacttcgctctgttataacctccggctttcgcgccgttagtgtgtttgaggtaccgggaagtgtaaggtccacccttggagctactttaaggcccgatcacgccttatatagtacaactatgcaagccacacccaacgcatcgcatattagtgcttttaaccttcgcatagtttccccgtcggcatatcgtgtttgtcctctccaaaatgacacagatacctacttaggtattccagcagacgtggcggcagttcttccagtagacgtggtgactgatcctaacatcttgctgggcatgcagacaacggtacacattgcggagctagtcaaggcatgtcatccgtcacccgatgttgtgagcgctgtaggggagcacctgaactggctcaacaaactcttactcccacttaaggaatcgactcagttgcaaggaagcgagtcgtacaaggagtgccttgcactcttgggtcgtgttcacgctgcgatgaagatggtgagaattggcttagtagtgccccagctgcaatacagaatgtacggtagcctcatcaaccaaatggcccaagtagcacaaaactacgaccgagaattcaagcaattcaaattattcatcatccaaaatcaaatccttggcagctatttgctgcagcagaacagggcatttgctgagagggagctgcagatggagagctttcatgctgctgtcatttctcaaagaagggaggagttggacaatacattcgcaaagatggaccgattgagcgggcaaatggaggcagagagtagtgcaatggagcaagccaaaaaggaaatggacgaaggattgaggcagttccagaataggcaagttgcgaacgccctctttgccgttcttagcgctgtagctcagattgggcttgcattccttacggctggtgcaacggctcctggagctgtggcgtcggcggggcaagctgtgagcatagcaggtcaggcggcgcaaggtctgcgaagggtggtggaaattctagagcagctggaggctgtgatggaggttgtggctgctgtgaaggacctcgtggattcattggaacaggtaggtcagattgtggacgcaccggtgatgccggaattgccctcagaggcggactggtccatttttgtgaacgaggtggaggccgtggcagagggcatgccaacggaagtctcggaggttccggtgtggcaggccaggtgcaagaatgtggctgcactgggtcgggagatgagcatcacggcagtacagatgtcggagctgcagtatgacatctgggtgcaaggcatgatgcgggatatggctcgaagccaggcagacaggctggccgcaattcaacccgcggaccttaccaactatttggagatggctacccagatggatatgcggactacgaggatgctgctggggctcctcaacatattgcgcatccagaatgcggcgctcaggtacgagtatcttctaatgcccacggagctcacaacatggccactgggtatggataccgtgggtgacttgctcatcgcgcaggagaatgctgcactgataggattaatgcagctagggccctcatctgatttcacgagcaggcatgtggtgaaagacatacctgtgaacttgctgctcgatggcgaggattgggagtttgagattcctgtgcaagctggcatgtccagcttcccttccagctggtctcgcgtccgtattcggcacctggagatgcactttgtgaaggaggccagcggtattggtggtgagattatccaccagcctaccacccagactgggaccgtttacatccttctgcagggttccactatcttccatgaccgcagaagagaccaggtgttgccttttcaggccgctgctccgctcaactaccattacgcgtaccgcctcgacaccggcgactccactctcacaaacgaaccctctgaacagtttgccaacaagttcatgcagatgacacccttcacccgttggaggcttcgtctgtctgcgtccgcaaaagagaatgcaggattagcctttcccacggctacagcacttgactccactacccagattgtcatcactttccatgttacggccatcagacaaattgactggcggcacgacgaagag

SEQ ID NO: 374 - DNA, 2601 bp, synthetic construct
  misc_feature 1..2601: note = Synthetic
  source 1..2601: mol_type = other DNA
atggctctcgtggattacggcaagcttttcgaggatctgaaccagataagcatgggtgtactggatcgggtagagttttcagaggtgatggtgatccacaggatgtatgtgaggctagctgatctgaatgtggggcagctcgagggagccgagaaagtgaagcgcttctatatctttgccgacatcgtcgagctcccagtcgtggaatggcggtggccgccgcaaataccaggatcggtgacggtgatcatattgtgtcgtcttcttcaatggccaactgatgggaggcagtcggacaccgagctccacctgacattcatgaagttgcatgccatacaacgagaggaaaatcggtgggagataaccgcagcagatggcatgaactggggagtttacatacacgcagaggaagtacaggttggcgtgctgacaatgtcatggtcttcggtacttagagtttcggcacttcgctctgttataacctccggctttcgcgccgttagtgtgtttgaggtaccgggaagtgtaaggtccacccttggagctactttaaggcccgatcacgccttatatagtacaactatgcaagccacacccaacgcatcgcatattagtgcttttaaccttcgcatagtttccccgtcggcatatcgtgtttgtcctctccaaaatgacacagatacctacttaggtattccagcagacgtggcggcagttcttccagtagacgtggtgactgatcctaacatcttgctgggcatgcagacaacggtacacattgcggagctagtcaaggcatgtcatccgtcacccgatgttgtgagcgctgtaggggagcacctgaactggctcaacaaactcttactcccacttaaggaatcgactcagttgcaaggaagcgagtcgtacaaggagtgccttgcactcttgggtcgtgttcacgctgcgatgaagatggtgagaattggcttagtagtgccccagctgcaatacagaatgtacggtagcctcatcaaccaaatggcccaagtagcacaaaactacgaccgagaattcaagcaattcaaattattcatcatccaaaatcaaatccttggcagctatttgctgcagcagaacagggcatttgctgagagggagctgcagatggagagctttcatgctgctgtcatttctcaaagaagggaggagttggacaatacattcgcaaagatggaccgattgagcgggcaaatggaggcagagagtagtgcaatggagcaagccaaaaaggaaatggacgaaggattgaggcagttccagaataggcaagttgcgaacgccctctttgccgttcttagcgctgtagctcagattgggcttgcattccttacggctggtgcaacggctcctggagctgtggcgtcggcggggcaagctgtgagcatagcaggtcaggcggcgcaaggtctgcgaagggtggtggaaattctagagcagctggaggctgtgatggaggttgtggctgctgtgaaggacctcgtggattcattggaacaggtaggtcagattgtggacgcaccggtgatgccggaattgccctcagaggcggactggtccatttttgtgaacgaggtggaggccgtggcagagggcatgccaacggaagtctcggaggttccggtgtggatcggcaagtgcaagaatgtggctgcactgggtcgggagatgagcatcacggcagtacagatgtcggagctgcagtatgacatctgggtgcaaggcatgatgcgggatatggctcgaagccaggcagacaggctggccgcaattcaacccgcggaccttaccaactatttggagatggctacccagatggatatgcggactacgaggatgctgctggggctcctcaacatattgcgcatccagaatgcggcgctcaggtacgagtatcttctaatgcccacggagctcacaacatggccactgggtatggataccgtgggtgacttgctcatcgcgcaggagaatgctgcactgataggattaatgcagctagggccctcatctgatttcacgagcaggcatgtggtgaaagacatacctgtgaacttgctgctcgatggcgaggattgggagtttgagattcctgtgcaagctggcatgtccagcttcccttccagctggtctcgcgtccgtattcggcacctggagatgcactttgtgaaggaggccagcggtattggtggtgagattatccaccagcctaccacccagactgggaccgtttacatccttctgcagggttccactatcttccatgaccgcagaagagaccaggtgttgccttttcaggccgctgctccgctcaactaccattacgcgtaccgcctcgacaccggcgactccactctcacaaacgaaccctctgaacagtttgccaacaagttcatgcagatgacacccttcacccgttggaggcttcgtctgtctgcgtccgcaaaagagaatgcaggattagcctttcccacggctacagcacttgactccactacccagattgtcatcactttccatgttacggccatcagacaaattgactggcggcacgacgaagag

SEQ ID NO: 375 - DNA, 2601 bp, synthetic construct
  misc_feature 1..2601: note = Synthetic
  source 1..2601: mol_type = other DNA
atggctctcgtggattacggcaagcttttcgaggatctgaaccagataagcatgggtgtactggatcgggtagagttttcagaggtgatggtgatccacaggatgtatgtgaggctagctgatctgaatgtggggcagctcgagggagccgagaaagtgaagcgcttctatatctttgccgacatcgtcgagctcccagtcgtggaatggcggtggccgccgcaaataccaggatcggtgacggtgatcatattgtgtcgtcttcttcaatggccaactgatgggaggcagtcggacaccgagctccacctgacattcatgaagttgcatgccatacaacgagaggaaaatcggtgggagataaccgcagcagatggcatgaactggggagtttacatacacgcagaggaagtacaggttggcgtgctgacaatgtcatggtcttcggtacttagagtttcggcacttcgctctgttataacctccggctttcgcgccgttagtgtgtttgaggtaccgggaagtgtaaggtccacccttggagctactttaaggcccgatcacgccttatatagtacaactatgcaagccacacccaacgcatcgcatattagtgcttttaaccttcgcatagtttccccgtcggcatatcgtgtttgtcctctccaaaatgacacagatacctacttaggtattccagcagacgtggcggcagttcttccagtagacgtggtgactgatcctaacatcttgctgggcatgcagacaacggtacacattgcggagctagtcaaggcatgtcatccgtcacccgatgttgtgagcgctgtaggggagcacctgaactggctcaacaaactcttactcccacttaaggaatcgactcagttgcaaggaagcgagtcgtacaaggagtgccttgcactcttgggtcgtgttcacgctgcgatgaagatggtgagaattggcttagtagtgccccagctgcaatacagaatgtacggtagcctcatcaaccaaatggcccaagtagcacaaaactacgaccgagaattcaagcaattcaaattattcatcatccaaaatcaaatccttggcagctatttgctgcagcagaacagggcatttgctgagagggagctgcagatggagagctttcatgctgctgtcatttctcaaagaagggaggagttggacaatacattcgcaaagatggaccgattgagcgggcaaatggaggcagagagtagtgcaatggagcaagccaaaaaggaaatggacgaaggattgaggcagttccagaataggcaagttgcgaacgccctctttgccgttcttagcgctgtagctcagattgggcttgcattccttacggctggtgcaacggctcctggagctgtggcgtcggcggggcaagctgtgagcatagcaggtcaggcggcgcaaggtctgcgaagggtggtggaaattctagagcagctggaggctgtgatggaggttgtggctgctgtgaaggacctcgtggattcattggaacaggtaggtcagattgtggacgcaccggtgatgccggaattgccctcagaggcggactggtccatttttgtgaacgaggtggaggccgtggcagagggcatgccaacggaagtctcggaggttccggtgtggacggtcaagtgcaagaatgtggctgcactgggtcgggagatgagcatcacggcagtacagatgtcggagctgcagtatgacatctgggtgcaaggcatgatgcgggatatggctcgaagccaggcagacaggctggccgcaattcaacccgcggaccttaccaactatttggagatggctacccagatggatatgcggactacgaggatgctgctggggctcctcaacatattgcgcatccagaatgcggcgctcaggtacgagtatcttctaatgcccacggagctcacaacatggccactgggtatggataccgtgggtgacttgctcatcgcgcaggagaatgctgcactgataggattaatgcagctagggccctcatctgatttcacgagcaggcatgtggtgaaagacatacctgtgaacttgctgctcgatggcgaggattgggagtttgagattcctgtgcaagctggcatgtccagcttcccttccagctggtctcgcgtccgtattcggcacctggagatgcactttgtgaaggaggccagcggtattggtggtgagattatccaccagcctaccacccagactgggaccgtttacatccttctgcagggttccactatcttccatgaccgcagaagagaccaggtgttgccttttcaggccgctgctccgctcaactaccattacgcgtaccgcctcgacaccggcgactccactctcacaaacgaaccctctgaacagtttgccaacaagttcatgcagatgacacccttcacccgttggaggcttcgtctgtctgcgtccgcaaaagagaatgcaggattagcctttcccacggctacagcacttgactccactacccagattgtcatcactttccatgttacggccatcagacaaattgactggcggcacgacgaagag

SEQ ID NO: 376 - DNA, 2601 bp, synthetic construct
  misc_feature 1..2601: note = Synthetic
  source 1..2601: mol_type = other DNA
atggctctcgtggattacggcaagcttttcgaggatctgaaccagataagcatgggtgtactggatcgggtagagttttcagaggtgatggtgatccacaggatgtatgtgaggctagctgatctgaatgtggggcagctcgagggagccgagaaagtgaagcgcttgtatatttttgccgacattatcgagctaccagtcgtggaatggcggtggccgccgcaaataccaggatcggtgacggtgatcatattgtgtcgtcttcttcaatggccaactgatgggaggcagtcggacaccgagctccacctgacattcatgaagttgcatgccatacaacgagaggaaaatcggtgggagataaccgcagcagatggcatgaactggggagtttacatacacgcagaggaagtacaggttggcgtgctgacaatgtcatggtcttcggtacttagagtttcggcacttcgctctgttataacctccggctttcgcgccgttagtgtgtttgaggtaccgggaagtgtaaggtccacccttggagctactttaaggcccgatcacgccttatatagtacaactatgcaagccacacccaacgcatcgcatattagtgcttttaaccttcgcatagtttccccgtcggcatatcgtgtttgtcctctccaaaatgacacagatacctacttaggtattccagcagacgtggcggcagttcttccagtagacgtggtgactgatcctaacatcttgctgggcatgcagacaacggtacacattgcggagctagtcaaggcatgtcatccgtcacccgatgttgtgagcgctgtaggggagcacctgaactggctcaacaaactcttactcccacttaaggaatcgactcagttgcaaggaagcgagtcgtacaaggagtgccttgcactcttgggtcgtgttcacgctgcgatgaagatggtgagaattggcttagtagtgccccagctgcaatacagaatgtacggtagcctcatcaaccaaatggcccaagtagcacaaaactacgaccgagaattcaagcaattcaaattattcatcatccaaaatcaaatccttggcagctatttgctgcagcagaacagggcatttgctgagagggagctgcagatggagagctttcatgctgctgtcatttctcaaagaagggaggagttggacaatacattcgcaaagatggaccgattgagcgggcaaatggaggcagagagtagtgcaatggagcaagccaaaaaggaaatggacgaaggattgaggcagttccagaataggcaagttgcgaacgccctctttgccgttcttagcgctgtagctcagattgggcttgcattccttacggctggtgcaacggctcctggagctgtggcgtcggcggggcaagctgtgagcatagcaggtcaggcggcgcaaggtctgcgaagggtggtggaaattctagagcagctggaggctgtgatggaggttgtggctgctgtgaaggacctcgtggattcattggaacaggtaggtcagattgtggacgcaccggtgatgccggaattgccctcagaggcggactggtccatttttgtgaacgaggtggaggccgtggcagagggcatgccaacggaagtctcggaggttccggtgtggatggtcaagtgcaagaatgtggctgcactgggtcgggagatgagcatcacggcagtacagatgtcggagctgcagtatgacatctgggtgcaaggcatgatgcgggatatggctcgaagccaggcagacaggctggccgcaattcaacccgcggaccttaccaactatttggagatggctacccagatggatatgcggactacgaggatgctgctggggctcctcaacatattgcgcatccagaatgcggcgctcaggtacgagtatcttctaatgcccacggagctcacaacatggccactgggtatggataccgtgggtgacttgctcatcgcgcaggagaatgctgcactgataggattaatgcagctagggccctcatctgatttcacgagcaggcatgtggtgaaagacatacctgtgaacttgctgctcgatggcgaggattgggagtttgagattcctgtgcaagctggcatgtccagcttcccttccagctggtctcgcgtccgtattcggcacctggagatgcactttgtgaaggaggccagcggtattggtggtgagattatccaccagcctaccacccagactgggaccgtttacatccttctgcagggttccactatcttccatgaccgcagaagagaccaggtgttgccttttcaggccgctgctccgctcaactaccattacgcgtaccgcctcgacaccggcgactccactctcacaaacgaaccctctgaacagtttgccaacaagttcatgcagatgacacccttcacccgttggaggcttcgtctgtctgcgtccgcaaaagagaatgcaggattagcctttcccacggctacagcacttgactccactacccagattgtcatcactttccatgttacggccatcagacaaattgactggcggcacgacgaagag

SEQ ID NO: 377 - DNA, 2601 bp, synthetic construct
  misc_feature 1..2601: note = Synthetic
  source 1..2601: mol_type = other DNA
atggctctcgtggattacggcaagcttttcgaggatctgaaccagataagcatgggtgtactggatcgggtagagttttcagaggtgatggtgatccacaggatgtatgtgaggctagctgatctgaatgtggggcagctcgagggagccgagaaagtgaagcgcttgtatatttttgccgacattatcgagctaccagtcgtggaatggcggtggccgccgcaaataccaggatcggtgacggtgatcatattgtgtcgtcttcttcaatggccaactgatgggaggcagtcggacaccgagctccacctgacattcatgaagttgcatgccatacaacgagaggaaaatcggtgggagataaccgcagcagatggcatgaactggggagtttacatacacgcagaggaagtacaggttggcgtgctgacaatgtcatggtcttcggtacttagagtttcggcacttcgctctgttataacctccggctttcgcgccgttagtgtgtttgaggtaccgggaagtgtaaggtccacccttggagctactttaaggcccgatcacgccttatatagtacaactatgcaagccacacccaacgcatcgcatattagtgcttttaaccttcgcatagtttccccgtcggcatatcgtgtttgtcctctccaaaatgacacagatacctacttaggtattccagcagacgtggcggcagttcttccagtagacgtggtgactgatcctaacatcttgctgggcatgcagacaacggtacacattgcggagctagtcaaggcatgtcatccgtcacccgatgttgtgagcgctgtaggggagcacctgaactggctcaacaaactcttactcccacttaaggaatcgactcagttgcaaggaagcgagtcgtacaaggagtgccttgcactcttgggtcgtgttcacgctgcgatgaagatggtgagaattggcttagtagtgccccagctgcaatacagaatgtacggtagcctcatcaaccaaatggcccaagtagcacaaaactacgaccgagaattcaagcaattcaaattattcatcatccaaaatcaaatccttggcagctatttgctgcagcagaacagggcatttgctgagagggagctgcagatggagagctttcatgctgctgtcatttctcaaagaagggaggagttggacaatacattcgcaaagatggaccgattgagcgggcaaatggaggcagagagtagtgcaatggagcaagccaaaaaggaaatggacgaaggattgaggcagttccagaataggcaagttgcgaacgccctctttgccgttcttagcgctgtagctcagattgggcttgcattccttacggctggtgcaacggctcctggagctgtggcgtcggcggggcaagctgtgagcatagcaggtcaggcggcgcaaggtctgcgaagggtggtggaaattctagagcagctggaggctgtgatggaggttgtggctgctgtgaaggacctcgtggattcattggaacaggtaggtcagattgtggacgcaccggtgatgccggaattgccctcagaggcggactggtccatttttgtgaacgaggtggaggccgtggcagagggcatgccaacggaagtctcggaggttccggtgtggcaggccaggtgcaagaatgtggctgcactgggtcgggagatgagcatcacggcagtacagatgtcggagctgcagtatgacatctgggtgcaaggcatgatgcgggatatggctcgaagccaggcagacaggctggccgcaattcaacccgcggaccttaccaactatttggagatggctacccagatggatatgcggactacgaggatgctgctggggctcctcaacatattgcgcatccagaatgcggcgctcaggtacgagtatcttctaatgcccacggagctcacaacatggccactgggtatggataccgtgggtgacttgctcatcgcgcaggagaatgctgcactgataggattaatgcagctagggccctcatctgatttcacgagcaggcatgtggtgaaagacatacctgtgaacttgctgctcgatggcgaggattgggagtttgagattcctgtgcaagctggcatgtccagcttcccttccagctggtctcgcgtccgtattcggcacctggagatgcactttgtgaaggaggccagcggtattggtggtgagattatccaccagcctaccacccagactgggaccgtttacatccttctgcagggttccactatcttccatgaccgcagaagagaccaggtgttgccttttcaggccgctgctccgctcaactaccattacgcgtaccgcctcgacaccggcgactccactctcacaaacgaaccctctgaacagtttgccaacaagttcatgcagatgacacccttcacccgttggaggcttcgtctgtctgcgtccgcaaaagagaatgcaggattagcctttcccacggctacagcacttgactccactacccagattgtcatcactttccatgttacggccatcagacaaattgactggcggcacgacgaagag

SEQ ID NO: 378 - DNA, 2601 bp, synthetic construct
  misc_feature 1..2601: note = Synthetic
  source 1..2601: mol_type = other DNA
atggctctcgtggattacggcaagcttttcgaggatctgaaccagataagcatgggtgtactggatcgggtagagttttcagaggtgatggtgatccacaggatgtatgtgaggctagctgatctgaatgtggggcagctcgagggagccgaggaagtgaagcgcttgtatatttttgccgacattatcgagctaccagtcgtggaatggcggtggccgccgcaaataccaggatcggtgacggtgatcatattgtgtcgtcttcttcaatggccaactgatgggaggcagtcggacaccgagctccacctgacattcatgaagttgcatgccatacaacgagaggaaaatcggtgggagataaccgcagcagatggcatgaactggggagtttacatacacgcagaggaagtacaggttggcgtgctgacaatgtcatggtcttcggtacttagagtttcggcacttcgctctgttataacctccggctttcgcgccgttagtgtgtttgaggtaccgggaagtgtaaggtccacccttggagctactttaaggcccgatcacgccttatatagtacaactatgcaagccacacccaacgcatcgcatattagtgcttttaaccttcgcatagtttccccgtcggcatatcgtgtttgtcctctccaaaatgacacagatacctacttaggtattccagcagacgtggcggcagttcttccagtagacgtggtgactgatcctaacatcttgctgggcatgcagacaacggtacacattgcggagctagtcaaggcatgtcatccgtcacccgatgttgtgagcgctgtaggggagcacctgaactggctcaacaaactcttactcccacttaaggaatcgactcagttgcaaggaagcgagtcgtacaaggagtgccttgcactcttgggtcgtgttcacgctgcgatgaagatggtgagaattggcttagtagtgccccagctgcaatacagaatgtacggtagcctcatcaaccaaatggcccaagtagcacaaaactacgaccgagaattcaagcaattcaaattattcatcatccaaaatcaaatccttggcagctatttgctgcagcagaacagggcatttgctgagagggagctgcagatggagagctttcatgctgctgtcatttctcaaagaagggaggagttggacaatacattcgcaaagatggaccgattgagcgggcaaatggaggcagagagtagtgcaatggagcaagccaaaaaggaaatggacgaaggattgaggcagttccagaataggcaagttgcgaacgccctctttgccgttcttagcgctgtagctcagattgggcttgcattccttacggctggtgcaacggctcctggagctgtggcgtcggcggggcaagctgtgagcatagcaggtcaggcggcgcaaggtctgcgaagggtggtggaaattctagagcagctggaggctgtgatggaggttgtggctgctgtgaatgacctcgtggattcattggaacaggtaggtcagattgtggacgcaccggtgatgccggaattgccctcagaggcggactggtccatttttgtgaacgaggtggaggccgtggcagagggcatgccaacggaagtctcggaggttccggtgtggaggggcaagtgcaagagcgtggctgcactgggtcgggagatgagcatcacggcagtacagatgtcggagctgcagtatgacatctgggtgcaaggcatgatgcgggatatggctcgaagccaggcagacaggctggccgcaattcaacccgcggaccttaccaactatttggagatggctacccagatggatatgcggactacgaggatgctgctggggctcctcaacatattgcgcatccagaatgcggcgctcaggtacgagtatcttctaatgcccacggagctcacaacatggccactgggtatggataccgtgggtgacttgctcatcgcgcaggagaatgctgcactgataggattaatgcagctagggccctcatctgatttcacgagcaggcatgtggtgaaagacatacctgtgaacttgctgctcgatggcgaggattgggagtttgagattcctgtgcaagctggcatgtccagcttcccttccagctggtctcgcgtccgtattcggcacctggagatgcactttgtgaaggaggccagcggtattggtggtgagattatccaccagcctaccacccagactgggaccgtttacatccttctgcagggttccactatcttccatgaccgcagaagagaccaggtgttgccttttcaggccgctgctccgctcaactaccattacgcgtaccgcctcgacaccggcgactccactctcacaaacgaaccctctgaacagtttgccaacaagttcatgcagatgacacccttcacccgttggaggcttcgtctgtctgcgtccgcaaaagagaatgcaggattagcctttcccacggctacagcacttgactccactacccagattgtcatcactttccatgttacggccatcagacaaattgactggcggcacgacgaagag

SEQ ID NO: 379 - DNA, 2601 bp, synthetic construct
  misc_feature 1..2601: note = Synthetic
  source 1..2601: mol_type = other DNA
atggctctcgtggattacggcaagcttttcgaggatctgaaccagataagcatgggtgtactggatcgggtagagttttcagaggtgatggtgatccacaggatgtatgtgaggctagctgatctgaatgtggggcagctcgagggagccgagaaagtgaagcgcttgtatatttttgccgacattatcgagctaccagtcgtggaatggcggtggccgccgcaaataccaggatcggtgacggtgatcatattgtgtcgtcttcttcaatggccaactgatgggaggcagtcggacaccgagctccacctgacattcatgaagttgcatgccatacaacgagaggaaaatcggtgggagataaccgcagcagatggcatgaactggggagtttacatacacgcagaggaagtacaggttggcgtgctgacaatgtcatggtcttcggtacttagagtttcggcacttcgctctgttataacctccggctttcgcgccgttagtgtgtttgaggtaccgggaagtgtaaggtccacccttggagctactttaaggcccgatcacgccttatatagtacaactatgcaagccacacccaacgcatcgcatattagtgcttttaaccttcgcatagtttccccgtcggcatatcgtgtttgtcctctccaaaatgacacagatacctacttaggtattccagcagacgtggcggcagttcttccagtagacgtggtgactgatcctaacatcttgctgggcatgcagacaacggtacacattgcggagctagtcaaggcatgtcatccgtcacccgatgttgtgagcgctgtaggggagcacctgaactggctcaacaaactcttactcccacttaaggaatcgactcagttgcaaggaagcgagtcgtacaaggagtgccttgcactcttgggtcgtgttcacgctgcgatgaagatggtgagaattggcttagtagtgccccagctgcaatacagaatgtacggtagcctcatcaaccaaatggcccaagtagcacaaaactacgaccgagaattcaagcaattcaaattattcatcatccaaaatcaaatccttggcagctatttgctgcagcagaacagggcatttgctgagagggagctgcagatggagagctttcatgctgctgtcatttctcaaagaagggaggagttggacaatacattcgcaaagatggaccgattgagcgggcaaatggaggcagagagtagtgcaatggagcaagccaaaaaggaaatggacgaaggattgaggcagttccagaataggcaagttgcgaacgccctctttgccgttcttagcgctgtagctcagattgggcttgcattccttacggctggtgcaacggctcctggagctgtggcgtcggcggggcaagctgtgagcatagcaggtcaggcggcgcaaggtctgcgaagggtggtggaaattctagagcagctggaggctgtgatggaggttgtggctgctgtgaaggacctcgtggattcattggaacaggtaggtcagattgtggacgcaccggtgatgccggaattgccctcagaggcggactggtccatttttgtgaacgaggtggaggccgtggcagagggcatgccaacggaagtctcggaggttccggtgtggaggggccggtgcaagaccgtggctgcactgggtcgggagatgagcatcacggcagtacagatgtcggagctgcagtatgacatctgggtgcaaggcatgatgcgggatatggctcgaagccaggcagacaggctggccgcaattcaacccgcggaccttaccaactatttggagatggctacccagatggatatgcggactacgaggatgctgctggggctcctcaacatattgcgcatccagaatgcggcgctcaggtacgagtatcttctaatgcccacggagctcacaacatggccactgggtatggataccgtgggtgacttgctcatcgcgcaggagaatgctgcactgataggattaatgcagctagggccctcatctgatttcacgagcaggcatgtggtgaaagacatacctgtgaacttgctgctcgatggcgaggattgggagtttgagattcctgtgcaagctggcatgtccagcttcccttccagctggtctcgcgtccgtattcggcacctggagatgcactttgtgaaggaggccagcggtattggtggtgagattatccaccagcctaccacccagactgggaccgtttacatccttctgcagggttccactatcttccatgaccgcagaagagaccaggtgttgccttttcaggccgctgctccgctcaactaccattacgcgtaccgcctcgacaccggcgactccactctcacaaacgaaccctctgaacagtttgccaacaagttcatgcagatgacacccttcacccgttggaggcttcgtctgtctgcgtccgcaaaagagaatgcaggattagcctttcccacggctacagcacttgactccactacccagattgtcatcactttccatgttacggccatcagacaaattgactggcggcacgacgaagag

SEQ ID NO: 380 - DNA, 2601 bp, synthetic construct
  misc_feature 1..2601: note = Synthetic
  source 1..2601: mol_type = other DNA
atggctctcgtggattacggcaagcttttcgaggatctgaaccagataagcatgggtgtactggatcgggtagagttttcagaggtgatggtgatccacaggatgtatgtgaggctagctgatctgaatgtggggcagctcgagggagccgagaaagtgaagcgcttgtatatttttaccgacgttatcgagctaccagtcgtggaatggcggtggccgccgcaaataccaggatcggtgacggtgatcatattgtgtcgtcttcttcaatggccaactgatgggaggcagtcggacaccgagctccacctgacattcatgaagttgcatgccatacaacgagaggaaaatcggtgggagataaccgcagcagatggcatgaactggggagtttacatacacgcagaggaagtacaggttggcgtgctgacaatgtcatggtcttcggtacttagagtttcggcacttcgctctgttataacctccggctttcgcgccgttagtgtgtttgaggtaccgggaagtgtaaggtccacccttggagctactttaaggcccgatcacgccttatatagtacaactatgcaagccacacccaacgcatcgcatattagtgcttttaaccttcgcatagtttccccgtcggcatatcgtgtttgtcctctccaaaatgacacagatacctacttaggtattccagcagacgtggcggcagttcttccagtagacgtggtgactgatcctaacatcttgctgggcatgcagacaacggtacacattgcggagctagtcaaggcatgtcatccgtcacccgatgttgtgagcgctgtaggggagcacctgaactggctcaacaaactcttactcccacttaaggaatcgactcagttgcaaggaagcgagtcgtacaaggagtgccttgcactcttgggtcgtgttcacgctgcgatgaagatggtgagaattggcttagtagtgccccagctgcaatacagaatgtacggtagcctcatcaaccaaatggcccaagtagcacaaaactacgaccgagaattcaagcaattcaaattattcatcatccaaaatcaaatccttggcagctatttgctgcagcagaacagggcatttgctgagagggagctgcagatggagagctttcatgctgctgtcatttctcaaagaagggaggagttggacaatacattcgcaaagatggaccgattgagcgggcaaatggaggcagagagtagtgcaatggagcaagccaaaaaggaaatggacgaaggattgaggcagttccagaataggcaagttgcgaacgccctctttgccgttcttagcgctgtagctcagattgggcttgcattccttacggctggtgcaacggctcctggagctgtggcgtcggcggggcaagctgtgagcatagcaggtcaggcggcgcaaggtctgcgaagggtggtggaaattctagagcagctggaggctgtgatggaggttgtggctgctgtgaaggacctcgtggattcattggaacaggtaggtcagattgtggacgcaccggtgatgccggaattgccctcagaggcggactggtccatttttgtgaacgaggtggaggccgtggcagagggcatgccaacggaagtctcggaggttccggtgtggatcggcaagtgcaagaatgtggctgcactgggtcgggagatgagcatcacggcagtacagatgtcggagctgcagtatgacatctgggtgcaaggcatgatgcgggatatggctcgaagccaggcagacaggctggccgcaattcaacccgcggaccttaccaactatttggagatggctacccagatggatatgcggactacgaggatgctgctggggctcctcaacatattgcgcatccagaatgcggcgctcaggtacgagtatcttctaatgcccacggagctcacaacatggccactgggtatggataccgtgggtgacttgctcatcgcgcaggagaatgctgcactgataggattaatgcagctagggccctcatctgatttcacgagcaggcatgtggtgaaagacatacctgtgaacttgctgctcgatggcgaggattgggagtttgagattcctgtgcaagctggcatgtccagcttcccttccagctggtctcgcgtccgtattcggcacctggagatgcactttgtgaaggaggccagcggtattggtggtgagattatccaccagcctaccacccagactgggaccgtttacatccttctgcagggttccactatcttccatgaccgcagaagagaccaggtgttgccttttcaggccgctgctccgctcaactaccattacgcgtaccgcctcgacaccggcgactccactctcacaaacgaaccctctgaacagtttgccaacaagttcatgcagatgacacccttcacccgttggaggcttcgtctgtctgcgtccgcaaaagagaatgcaggattagcctttcccacggctacagcacttgactccactacccagattgtcatcactttccatgttacggccatcagacaaattgactggcggcacgacgaagag

SEQ ID NO: 381 - DNA, 2601 bp, synthetic construct
  misc_feature 1..2601: note = Synthetic
  source 1..2601: mol_type = other DNA
atggctctcgtggattacggcaagcttttcgaggatctgaaccagataagcatgggtgtactggatcgggtagagttttcagaggtgatggtgatccacaggatgtatgtgaggctagctgatctgaatgtggggcagctcgagggagccgagaaagtgaagcgcttgtatgttttttgcgacattatcgagctaccagtcgtggaatggcggtggccgccgcaaataccaggatcggtgacggtgatcatattgtgtcgtcttcttcaatggccaactgatgggaggcagtcggacaccgagctccacctgacattcatgaagttgcatgccatacaacgagaggaaaatcggtgggagataaccgcagcagatggcatgaactggggagtttacatacacgcagaggaagtacaggttggcgtgctgacaatgtcatggtcttcggtacttagagtttcggcacttcgctctgttataacctccggctttcgcgccgttagtgtgtttgaggtaccgggaagtgtaaggtccacccttggagctactttaaggcccgatcacgccttatatagtacaactatgcaagccacacccaacgcatcgcatattagtgcttttaaccttcgcatagtttccccgtcggcatatcgtgtttgtcctctccaaaatgacacagatacctacttaggtattccagcagacgtggcggcagttcttccagtagacgtggtgactgatcctaacatcttgctgggcatgcagacaacggtacacattgcggagctagtcaaggcatgtcatccgtcacccgatgttgtgagcgctgtaggggagcacctgaactggctcaacaaactcttactcccacttaaggaatcgactcagttgcaaggaagcgagtcgtacaaggagtgccttgcactcttgggtcgtgttcacgctgcgatgaagatggtgagaattggcttagtagtgccccagctgcaatacagaatgtacggtagcctcatcaaccaaatggcccaagtagcacaaaactacgaccgagaattcaagcaattcaaattattcatcatccaaaatcaaatccttggcagctatttgctgcagcagaacagggcatttgctgagagggagctgcagatggagagctttcatgctgctgtcatttctcaaagaagggaggagttggacaatacattcgcaaagatggaccgattgagcgggcaaatggaggcagagagtagtgcaatggagcaagccaaaaaggaaatggacgaaggattgaggcagttccagaataggcaagttgcgaacgccctctttgccgttcttagcgctgtagctcagattgggcttgcattccttacggctggtgcaacggctcctggagctgtggcgtcggcggggcaagctgtgagcatagcaggtcaggcggcgcaaggtctgcgaagggtggtggaaattctagagcagctggaggctgtgatggaggttgtggctgctgtgaaggacctcgtggattcattggaacaggtaggtcagattgtggacgcaccggtgatgccggaattgccctcagaggcggactggtccatttttgtgaacgaggtggaggccgtggcagagggcatgccaacggaagtctcggaggttccggtgtggctggccaggtgcaagaatgtggctgcactgggtcgggagatgagcatcacggcagtacagatgtcggagctgcagtatgacatctgggtgcaaggcatgatgcgggatatggctcgaagccaggcagacaggctggccgcaattcaacccgcggaccttaccaactatttggagatggctacccagatggatatgcggactacgaggatgctgctggggctcctcaacatattgcgcatccagaatgcggcgctcaggtacgagtatcttctaatgcccacggagctcacaacatggccactgggtatggataccgtgggtgacttgctcatcgcgcaggagaatgctgcactgataggattaatgcagctagggccctcatctgatttcacgagcaggcatgtggtgaaagacatacctgtgaacttgctgctcgatggcgaggattgggagtttgagattcctgtgcaagctggcatgtccagcttcccttccagctggtctcgcgtccgtattcggcacctggagatgcactttgtgaaggaggccagcggtattggtggtgagattatccaccagcctaccacccagactgggaccgtttacatccttctgcagggttccactatcttccatgaccgcagaagagaccaggtgttgccttttcaggccgctgctccgctcaactaccattacgcgtaccgcctcgacaccggcgactccactctcacaaacgaaccctctgaacagtttgccaacaagttcatgcagatgacacccttcacccgttggaggcttcgtctgtctgcgtccgcaaaagagaatgcaggattagcctttcccacggctacagcacttgactccactacccagattgtcatcactttccatgttacggccatcagacaaattgactggcggcacgacgaagag

SEQ ID NO: 382 - DNA, 2601 bp, synthetic construct
  misc_feature 1..2601: note = Synthetic
  source 1..2601: mol_type = other DNA
atggctctcgtggattacggcaagcttttcgaggatctgaaccagataagcatgggtgtactggatcgggtagagttttcagaggtgatggtgatccacaggatgtatgtgaggctagctgatctgaatgtggggcagctcgagggagccgagaaagtgaagcgcttgtatgtttttagcgacattatcgagctaccagtcgtggaatggcggtggccgccgcaaataccaggatcggtgacggtgatcatattgtgtcgtcttcttcaatggccaactgatgggaggcagtcggacaccgagctccacctgacattcatgaagttgcatgccatacaacgagaggaaaatcggtgggagataaccgcagcagatggcatgaactggggagtttacatacacgcagaggaagtacaggttggcgtgctgacaatgtcatggtcttcggtacttagagtttcggcacttcgctctgttataacctccggctttcgcgccgttagtgtgtttgaggtaccgggaagtgtaaggtccacccttggagctactttaaggcccgatcacgccttatatagtacaactatgcaagccacacccaacgcatcgcatattagtgcttttaaccttcgcatagtttccccgtcggcatatcgtgtttgtcctctccaaaatgacacagatacctacttaggtattccagcagacgtggcggcagttcttccagtagacgtggtgactgatcctaacatcttgctgggcatgcagacaacggtacacattgcggagctagtcaaggcatgtcatccgtcacccgatgttgtgagcgctgtaggggagcacctgaactggctcaacaaactcttactcccacttaaggaatcgactcagttgcaaggaagcgagtcgtacaaggagtgccttgcactcttgggtcgtgttcacgctgcgatgaagatggtgagaattggcttagtagtgccccagctgcaatacagaatgtacggtagcctcatcaaccaaatggcccaagtagcacaaaactacgaccgagaattcaagcaattcaaattattcatcatccaaaatcaaatccttggcagctatttgctgcagcagaacagggcatttgctgagagggagctgcagatggagagctttcatgctgctgtcatttctcaaagaagggaggagttggacaatacattcgcaaagatggaccgattgagcgggcaaatggaggcagagagtagtgcaatggagcaagccaaaaaggaaatggacgaaggattgaggcagttccagaataggcaagttgcgaacgccctctttgccgttcttagcgctgtagctcagattgggcttgcattccttacggctggtgcaacggctcctggagctgtggcgtcggcggggcaagctgtgagcatagcaggtcaggcggcgcaaggtctgcgaagggtggtggaaattctagagcagctggaggctgtgatggaggttgtggctgctgtgaaggacctcgtggattcattggaacaggtaggtcagattgtggacgcaccggtgatgccggaattgccctcagaggcggactggtccatttttgtgaacgaggtggaggccgtggcagagggcatgccaacggaagtctcggaggttccggtgtggatcggcaagtgcaagaatgtggctgcactgggtcgggagatgagcatcacggcagtacagatgtcggagctgcagtatgacatctgggtgcaaggcatgatgcgggatatggctcgaagccaggcagacaggctggccgcaattcaacccgcggaccttaccaactatttggagatggctacccagatggatatgcggactacgaggatgctgctggggctcctcaacatattgcgcatccagaatgcggcgctcaggtacgagtatcttctaatgcccacggagctcacaacatggccactgggtatggataccgtgggtgacttgctcatcgcgcaggagaatgctgcactgataggattaatgcagctagggccctcatctgatttcacgagcaggcatgtggtgaaagacatacctgtgaacttgctgctcgatggcgaggattgggagtttgagattcctgtgcaagctggcatgtccagcttcccttccagctggtctcgcgtccgtattcggcacctggagatgcactttgtgaaggaggccagcggtattggtggtgagattatccaccagcctaccacccagactgggaccgtttacatccttctgcagggttccactatcttccatgaccgcagaagagaccaggtgttgccttttcaggccgctgctccgctcaactaccattacgcgtaccgcctcgacaccggcgactccactctcacaaacgaaccctctgaacagtttgccaacaagttcatgcagatgacacccttcacccgttggaggcttcgtctgtctgcgtccgcaaaagagaatgcaggattagcctttcccacggctacagcacttgactccactacccagattgtcatcactttccatgttacggccatcagacaaattgactggcggcacgacgaagag

SEQ ID NO: 383 - DNA, 2601 bp, synthetic construct
  misc_feature 1..2601: note = Synthetic
  source 1..2601: mol_type = other DNA
atggctctcgtggattacggcaagcttttcgaggatctgaaccagataagcatgggtgtactggatcgggtagagttttcagaggtgatggtgatccacaggatgtatgtgaggctagctgatctgaatgtggggcagctcgagggagccgagaaagtgaagcgcttgtatgtttttagcgacattatcgagctaccagtcgtggaatggcggtggccgccgcaaataccaggatcggtgacggtgatcatattgtgtcgtcttcttcaatggccaactgatgggaggcagtcggacaccgagctccacctgacattcatgaagttgcatgccatacaacgagaggaaaatcggtgggagataaccgcagcagatggcatgaactggggagtttacatacacgcagaggaagtacaggttggcgtgctgacaatgtcatggtcttcggtacttagagtttcggcacttcgctctgttataacctccggctttcgcgccgttagtgtgtttgaggtaccgggaagtgtaaggtccacccttggagctactttaaggcccgatcacgccttatatagtacaactatgcaagccacacccaacgcatcgcatattagtgcttttaaccttcgcatagtttccccgtcggcatatcgtgtttgtcctctccaaaatgacacagatacctacttaggtattccagcagacgtggcggcagttcttccagtagacgtggtgactgatcctaacatcttgctgggcatgcagacaacggtacacattgcggagctagtcaaggcatgtcatccgtcacccgatgttgtgagcgctgtaggggagcacctgaactggctcaacaaactcttactcccacttaaggaatcgactcagttgcaaggaagcgagtcgtacaaggagtgccttgcactcttgggtcgtgttcacgctgcgatgaagatggtgagaattggcttagtagtgccccagctgcaatacagaatgtacggtagcctcatcaaccaaatggcccaagtagcacaaaactacgaccgagaattcaagcaattcaaattattcatcatccaaaatcaaatccttggcagctatttgctgcagcagaacagggcatttgctgagagggagctgcagatggagagctttcatgctgctgtcatttctcaaagaagggaggagttggacaatacattcgcaaagatggaccgattgagcgggcaaatggaggcagagagtagtgcaatggagcaagccaaaaaggaaatggacgaaggattgaggcagttccagaataggcaagttgcgaacgccctctttgccgttcttagcgctgtagctcagattgggcttgcattccttacggctggtgcaacggctcctggagctgtggcgtcggcggggcaagctgtgagcatagcaggtcaggcggcgcaaggtctgcgaagggtggtggaaattctagagcagctggaggctgtgatggaggttgtggctgctgtgaaggacctcgtggattcattggaacaggtaggtcagattgtggacgcaccggtgatgccggaattgccctcagaggcggactggtccatttttgtgaacgaggtggaggccgtggcagagggcatgccaacggaagtctcggaggttccggtgtggaggggccggtgcaagaccgtggctgcactgggtcgggagatgagcatcacggcagtacagatgtcggagctgcagtatgacatctgggtgcaaggcatgatgcgggatatggctcgaagccaggcagacaggctggccgcaattcaacccgcggaccttaccaactatttggagatggctacccagatggatatgcggactacgaggatgctgctggggctcctcaacatattgcgcatccagaatgcggcgctcaggtacgagtatcttctaatgcccacggagctcacaacatggccactgggtatggataccgtgggtgacttgctcatcgcgcaggagaatgctgcactgataggattaatgcagctagggccctcatctgatttcacgagcaggcatgtggtgaaagacatacctgtgaacttgctgctcgatggcgaggattgggagtttgagattcctgtgcaagctggcatgtccagcttcccttccagctggtctcgcgtccgtattcggcacctggagatgcactttgtgaaggaggccagcggtattggtggtgagattatccaccagcctaccacccagactgggaccgtttacatccttctgcagggttccactatcttccatgaccgcagaagagaccaggtgttgccttttcaggccgctgctccgctcaactaccattacgcgtaccgcctcgacaccggcgactccactctcacaaacgaaccctctgaacagtttgccaacaagttcatgcagatgacacccttcacccgttggaggcttcgtctgtctgcgtccgcaaaagagaatgcaggattagcctttcccacggctacagcacttgactccactacccagattgtcatcactttccatgttacggccatcagacaaattgactggcggcacgacgaagag

SEQ ID NO: 384 - DNA, 2601 bp, synthetic construct
  misc_feature 1..2601: note = Synthetic
  source 1..2601: mol_type = other DNA
atggctctcgtggattacggcaagcttttcgaggatctgaaccagataagcatgggtgtactggatcgggtagagttttcagaggtgatggtgatccacaggatgtatgtgaggctagctgatctgaatgtggggcagctcgagggagccgagaaagtgaagcgcttgtatgttttttccgacgttatcgagctaccagtcgtggaatggcggtggccgccgcaaataccaggatcggtgacggtgatcatattgtgtcgtcttcttcaatggccaactgatgggaggcagtcggacaccgagctccacctgacattcatgaagttgcatgccatacaacgagaggaaaatcggtgggagataaccgcagcagatggcatgaactggggagtttacatacacgcagaggaagtacaggttggcgtgctgacaatgtcatggtcttcggtacttagagtttcggcacttcgctctgttataacctccggctttcgcgccgttagtgtgtttgaggtaccgggaagtgtaaggtccacccttggagctactttaaggcccgatcacgccttatatagtacaactatgcaagccacacccaacgcatcgcatattagtgcttttaaccttcgcatagtttccccgtcggcatatcgtgtttgtcctctccaaaatgacacagatacctacttaggtattccagcagacgtggcggcagttcttccagtagacgtggtgactgatcctaacatcttgctgggcatgcagacaacggtacacattgcggagctagtcaaggcatgtcatccgtcacccgatgttgtgagcgctgtaggggagcacctgaactggctcaacaaactcttactcccacttaaggaatcgactcagttgcaaggaagcgagtcgtacaaggagtgccttgcactcttgggtcgtgttcacgctgcgatgaagatggtgagaattggcttagtagtgccccagctgcaatacagaatgtacggtagcctcatcaaccaaatggcccaagtagcacaaaactacgaccgagaattcaagcaattcaaattattcatcatccaaaatcaaatccttggcagctatttgctgcagcagaacagggcatttgctgagagggagctgcagatggagagctttcatgctgctgtcatttctcaaagaagggaggagttggacaatacattcgcaaagatggaccgattgagcgggcaaatggaggcagagagtagtgcaatggagcaagccaaaaaggaaatggacgaaggattgaggcagttccagaataggcaagttgcgaacgccctctttgccgttcttagcgctgtagctcagattgggcttgcattccttacggctggtgcaacggctcctggagctgtggcgtcggcggggcaagctgtgagcatagcaggtcaggcggcgcaaggtctgcgaagggtggtggaaattctagagcagctggaggctgtgatggaggttgtggctgctgtgaaggacctcgtggattcattggaacaggtaggtcagattgtggacgcaccggtgatgccggaattgccctcagaggcggactggtccatttttgtgaacgaggtggaggccgtggcagagggcatgccaacggaagtctcggaggttccggtgtggaggggcaagtgcaagagcgtggctgcactgggtcgggagatgagcatcacggcagtacagatgtcggagctgcagtatgacatctgggtgcaaggcatgatgcgggatatggctcgaagccaggcagacaggctggccgcaattcaacccgcggaccttaccaactatttggagatggctacccagatggatatgcggactacgaggatgctgctggggctcctcaacatattgcgcatccagaatgcggcgctcaggtacgagtatcttctaatgcccacggagctcacaacatggccactgggtatggataccgtgggtgacttgctcatcgcgcaggagaatgctgcactgataggattaatgcagctagggccctcatctgatttcacgagcaggcatgtggtgaaagacatacctgtgaacttgctgctcgatggcgaggattgggagtttgagattcctgtgcaagctggcatgtccagcttcccttccagctggtctcgcgtccgtattcggcacctggagatgcactttgtgaaggaggccagcggtattggtggtgagattatccaccagcctaccacccagactgggaccgtttacatccttctgcagggttccactatcttccatgaccgcagaagagaccaggtgttgccttttcaggccgctgctccgctcaactaccattacgcgtaccgcctcgacaccggcgactccactctcacaaacgaaccctctgaacagtttgccaacaagttcatgcagatgacacccttcacccgttggaggcttcgtctgtctgcgtccgcaaaagagaatgcaggattagcctttcccacggctacagcacttgactccactacccagattgtcatcactttccatgttacggccatcagacaaattgactggcggcacgacgaagag

SEQ ID NO: 385 - DNA, 2601 bp, synthetic construct
  misc_feature 1..2601: note = Synthetic
  source 1..2601: mol_type = other DNA
atggctctcgtggattacggcaagcttttcgaggatctgaaccagataagcatgggtgtactggatcgggtagagttttcagaggtgatggtgatccacaggatgtatgtgaggctagctgatctgaatgtggggcagctcgagggagccgagaaagtgaagcgcttgtatgttttttccgacgttatcgagctaccagtcgtggaatggcggtggccgccgcaaataccaggatcggtgacggtgatcatattgtgtcgtcttcttcaatggccaactgatgggaggcagtcggacaccgagctccacctgacattcatgaagttgcatgccatacaacgagaggaaaatcggtgggagataaccgcagcagatggcatgaactggggagtttacatacacgcagaggaagtacaggttggcgtgctgacaatgtcatggtcttcggtacttagagtttcggcacttcgctctgttataacctccggctttcgcgccgttagtgtgtttgaggtaccgggaagtgtaaggtccacccttggagctactttaaggcccgatcacgccttatatagtacaactatgcaagccacacccaacgcatcgcatattagtgcttttaaccttcgcatagtttccccgtcggcatatcgtgtttgtcctctccaaaatgacacagatacctacttaggtattccagcagacgtggcggcagttcttccagtagacgtggtgactgatcctaacatcttgctgggcatgcagacaacggtacacattgcggagctagtcaaggcatgtcatccgtcacccgatgttgtgagcgctgtaggggagcacctgaactggctcaacaaactcttactcccacttaaggaatcgactcagttgcaaggaagcgagtcgtacaaggagtgccttgcactcttgggtcgtgttcacgctgcgatgaagatggtgagaattggcttagtagtgccccagctgcaatacagaatgtacggtagcctcatcaaccaaatggcccaagtagcacaaaactacgaccgagaattcaagcaattcaaattattcatcatccaaaatcaaatccttggcagctatttgctgcagcagaacagggcatttgctgagagggagctgcagatggagagctttcatgctgctgtcatttctcaaagaagggaggagttggacaatacattcgcaaagatggaccgattgagcgggcaaatggaggcagagagtagtgcaatggagcaagccaaaaaggaaatggacgaaggattgaggcagttccagaataggcaagttgcgaacgccctctttgccgttcttagcgctgtagctcagattgggcttgcattccttacggctggtgcaacggctcctggagctgtggcgtcggcggggcaagctgtgagcatagcaggtcaggcggcgcaaggtctgcgaagggtggtggaaattctagagcagctggaggctgtgatggaggttgtggctgctgtgaaggacctcgtggattcattggaacaggtaggtcagattgtggacgcaccggtgatgccggaattgccctcagaggcggactggtccatttttgtgaacgaggtggaggccgtggcagagggcatgccaacggaagtctcggaggttccggtgtggagggtcaagtgcaagaatgtggctgcactgggtcgggagatgagcatcacggcagtacagatgtcggagctgcagtatgacatctgggtgcaaggcatgatgcgggatatggctcgaagccaggcagacaggctggccgcaattcaacccgcggaccttaccaactatttggagatggctacccagatggatatgcggactacgaggatgctgctggggctcctcaacatattgcgcatccagaatgcggcgctcaggtacgagtatcttctaatgcccacggagctcacaacatggccactgggtatggataccgtgggtgacttgctcatcgcgcaggagaatgctgcactgataggattaatgcagctagggccctcatctgatttcacgagcaggcatgtggtgaaagacatacctgtgaacttgctgctcgatggcgaggattgggagtttgagattcctgtgcaagctggcatgtccagcttcccttccagctggtctcgcgtccgtattcggcacctggagatgcactttgtgaaggaggccagcggtattggtggtgagattatccaccagcctaccacccagactgggaccgtttacatccttctgcagggttccactatcttccatgaccgcagaagagaccaggtgttgccttttcaggccgctgctccgctcaactaccattacgcgtaccgcctcgacaccggcgactccactctcacaaacgaaccctctgaacagtttgccaacaagttcatgcagatgacacccttcacccgttggaggcttcgtctgtctgcgtccgcaaaagagaatgcaggattagcctttcccacggctacagcacttgactccactacccagattgtcatcactttccatgttacggccatcagacaaattgactggcggcacgacgaagag

SEQ ID NO: 386 - DNA, 2601 bp, synthetic construct
  misc_feature 1..2601: note = Synthetic
  source 1..2601: mol_type = other DNA
atggctctcgtggattacggcaagcttttcgaggatctgaaccagataagcatgggtgtactggatcgggtagagttttcagaggtgatggtgatccacaggatgtatgtgaggctagctgatctgaatgtggggcagctcgagggagccgagaaagtgatgcggttgtatatttttgccgacgttgtcgagctaccagtcgtggaatggcggtggccgccgcaaataccaggatcggtgacggtgatcatattgtgtcgtcttcttcaatggccaactgatgggaggcagtcggacaccgagctccacctgacattcatgaagttgcatgccatacaacgagaggaaaatcggtgggagataaccgcagcagatggcatgaactggggagtttacatacacgcagaggaagtacaggttggcgtgctgacaatgtcatggtcttcggtacttagagtttcggcacttcgctctgttataacctccggctttcgcgccgttagtgtgtttgaggtaccgggaagtgtaaggtccacccttggagctactttaaggcccgatcacgccttatatagtacaactatgcaagccacacccaacgcatcgcatattagtgcttttaaccttcgcatagtttccccgtcggcatatcgtgtttgtcctctccaaaatgacacagatacctacttaggtattccagcagacgtggcggcagttcttccagtagacgtggtgactgatcctaacatcttgctgggcatgcagacaacggtacacattgcggagctagtcaaggcatgtcatccgtcacccgatgttgtgagcgctgtaggggagcacctgaactggctcaacaaactcttactcccacttaaggaatcgactcagttgcaaggaagcgagtcgtacaaggagtgccttgcactcttgggtcgtgttcacgctgcgatgaagatggtgagaattggcttagtagtgccccagctgcaatacagaatgtacggtagcctcatcaaccaaatggcccaagtagcacaaaactacgaccgagaattcaagcaattcaaattattcatcatccaaaatcaaatccttggcagctatttgctgcagcagaacagggcatttgctgagagggagctgcagatggagagctttcatgctgctgtcatttctcaaagaagggaggagttggacaatacattcgcaaagatggaccgattgagcgggcaaatggaggcagagagtagtgcaatggagcaagccaaaaaggaaatggacgaaggattgaggcagttccagaataggcaagttgcgaacgccctctttgccgttcttagcgctgtagctcagattgggcttgcattccttacggctggtgcaacggctcctggagctgtggcgtcggcggggcaagctgtgagcatagcaggtcaggcggcgcaaggtctgcgaagggtggtggaaattctagagcagctggaggctgtgatggaggttgtggctgctgtgaaggacctcgtggattcattggaacaggtaggtcagattgtggacgcaccggtgatgccggaattgccctcagaggcggactggtccatttttgtgaacgaggtggaggccgtggcagagggcatgccaacggaagtctcggaggttccggtgtggaggggcaagtgcaagagcgtggctgcactgggtcgggagatgagcatcacggcagtacagatgtcggagctgcagtatgacatctgggtgcaaggcatgatgcgggatatggctcgaagccaggcagacaggctggccgcaattcaacccgcggaccttaccaactatttggagatggctacccagatggatatgcggactacgaggatgctgctggggctcctcaacatattgcgcatccagaatgcggcgctcaggtacgagtatcttctaatgcccacggagctcacaacatggccactgggtatggataccgtgggtgacttgctcatcgcgcaggagaatgctgcactgataggattaatgcagctagggccctcatctgatttcacgagcaggcatgtggtgaaagacatacctgtgaacttgctgctcgatggcgaggattgggagtttgagattcctgtgcaagctggcatgtccagcttcccttccagctggtctcgcgtccgtattcggcacctggagatgcactttgtgaaggaggccagcggtattggtggtgagattatccaccagcctaccacccagactgggaccgtttacatccttctgcagggttccactatcttccatgaccgcagaagagaccaggtgttgccttttcaggccgctgctccgctcaactaccattacgcgtaccgcctcgacaccggcgactccactctcacaaacgaaccctctgaacagtttgccaacaagttcatgcagatgacacccttcacccgttggaggcttcgtctgtctgcgtccgcaaaagagaatgcaggattagcctttcccacggctacagcacttgactccactacccagattgtcatcactttccatgttacggccatcagacaaattgactggcggcacgacgaagag

SEQ ID NO: 387 - DNA, 2601 bp, synthetic construct
  misc_feature 1..2601: note = Synthetic
  source 1..2601: mol_type = other DNA
atggctctcgtggattacggcaagcttttcgaggatctgaaccagataagcatgggtgtactggatcgggtagagttttcagaggtgatggtgatccacaggatgtatgtgaggctagctgatctgaatgtggggcagctcgagggagccgagaaagtgaggcacttgtatattttttgcgacgttatcgagctaccagtcgtggaatggcggtggccgccgcaaataccaggatcggtgacggtgatcatattgtgtcgtcttcttcaatggccaactgatgggaggcagtcggacaccgagctccacctgacattcatgaagttgcatgccatacaacgagaggaaaatcggtgggagataaccgcagcagatggcatgaactggggagtttacatacacgcagaggaagtacaggttggcgtgctgacaatgtcatggtcttcggtacttagagtttcggcacttcgctctgttataacctccggctttcgcgccgttagtgtgtttgaggtaccgggaagtgtaaggtccacccttggagctactttaaggcccgatcacgccttatatagtacaactatgcaagccacacccaacgcatcgcatattagtgcttttaaccttcgcatagtttccccgtcggcatatcgtgtttgtcctctccaaaatgacacagatacctacttaggtattccagcagacgtggcggcagttcttccagtagacgtggtgactgatcctaacatcttgctgggcatgcagacaacggtacacattgcggagctagtcaaggcatgtcatccgtcacccgatgttgtgagcgctgtaggggagcacctgaactggctcaacaaactcttactcccacttaaggaatcgactcagttgcaaggaagcgagtcgtacaaggagtgccttgcactcttgggtcgtgttcacgctgcgatgaagatggtgagaattggcttagtagtgccccagctgcaatacagaatgtacggtagcctcatcaaccaaatggcccaagtagcacaaaactacgaccgagaattcaagcaattcaaattattcatcatccaaaatcaaatccttggcagctatttgctgcagcagaacagggcatttgctgagagggagctgcagatggagagctttcatgctgctgtcatttctcaaagaagggaggagttggacaatacattcgcaaagatggaccgattgagcgggcaaatggaggcagagagtagtgcaatggagcaagccaaaaaggaaatggacgaaggattgaggcagttccagaataggcaagttgcgaacgccctctttgccgttcttagcgctgtagctcagattgggcttgcattccttacggctggtgcaacggctcctggagctgtggcgtcggcggggcaagctgtgagcatagcaggtcaggcggcgcaaggtctgcgaagggtggtggaaattctagagcagctggaggctgtgatggaggttgtggctgctgtgaaggacctcgtggattcattggaacaggtaggtcagattgtggacgcaccggtgatgccggaattgccctcagaggcggactggtccatttttgtgaacgaggtggaggccgtggcagagggcatgccaacggaagtctcggaggttccggtgtggatcggcaagtgcaagaatgtggctgcactgggtcgggagatgagcatcacggcagtacagatgtcggagctgcagtatgacatctgggtgcaaggcatgatgcgggatatggctcgaagccaggcagacaggctggccgcaattcaacccgcggaccttaccaactatttggagatggctacccagatggatatgcggactacgaggatgctgctggggctcctcaacatattgcgcatccagaatgcggcgctcaggtacgagtatcttctaatgcccacggagctcacaacatggccactgggtatggataccgtgggtgacttgctcatcgcgcaggagaatgctgcactgataggattaatgcagctagggccctcatctgatttcacgagcaggcatgtggtgaaagacatacctgtgaacttgctgctcgatggcgaggattgggagtttgagattcctgtgcaagctggcatgtccagcttcccttccagctggtctcgcgtccgtattcggcacctggagatgcactttgtgaaggaggccagcggtattggtggtgagattatccaccagcctaccacccagactgggaccgtttacatccttctgcagggttccactatcttccatgaccgcagaagagaccaggtgttgccttttcaggccgctgctccgctcaactaccattacgcgtaccgcctcgacaccggcgactccactctcacaaacgaaccctctgaacagtttgccaacaagttcatgcagatgacacccttcacccgttggaggcttcgtctgtctgcgtccgcaaaagagaatgcaggattagcctttcccacggctacagcacttgactccactacccagattgtcatcactttccatgttacggccatcagacaaattgactggcggcacgacgaagag

SEQ ID NO: 388 - DNA, 2601 bp, synthetic construct
  misc_feature 1..2601: note = Synthetic
  source 1..2601: mol_type = other DNA
atggctctcgtggattacggcaagcttttcgaggatctgaaccagataagcatgggtgtactggatcgggtagagttttcagaggtgatggtgatccacaggatgtatgtgaggctagctgatctgaatgtggggcagctcgagggagccgagaaagtgaggcacttgtatatttttagcgacgttgtcgagctaccagtcgtggaatggcggtggccgccgcaaataccaggatcggtgacggtgatcatattgtgtcgtcttcttcaatggccaactgatgggaggcagtcggacaccgagctccacctgacattcatgaagttgcatgccatacaacgagaggaaaatcggtgggagataaccgcagcagatggcatgaactggggagtttacatacacgcagaggaagtacaggttggcgtgctgacaatgtcatggtcttcggtacttagagtttcggcacttcgctctgttataacctccggctttcgcgccgttagtgtgtttgaggtaccgggaagtgtaaggtccacccttggagctactttaaggcccgatcacgccttatatagtacaactatgcaagccacacccaacgcatcgcatattagtgcttttaaccttcgcatagtttccccgtcggcatatcgtgtttgtcctctccaaaatgacacagatacctacttaggtattccagcagacgtggcggcagttcttccagtagacgtggtgactgatcctaacatcttgctgggcatgcagacaacggtacacattgcggagctagtcaaggcatgtcatccgtcacccgatgttgtgagcgctgtaggggagcacctgaactggctcaacaaactcttactcccacttaaggaatcgactcagttgcaaggaagcgagtcgtacaaggagtgccttgcactcttgggtcgtgttcacgctgcgatgaagatggtgagaattggcttagtagtgccccagctgcaatacagaatgtacggtagcctcatcaaccaaatggcccaagtagcacaaaactacgaccgagaattcaagcaattcaaattattcatcatccaaaatcaaatccttggcagctatttgctgcagcagaacagggcatttgctgagagggagctgcagatggagagctttcatgctgctgtcatttctcaaagaagggaggagttggacaatacattcgcaaagatggaccgattgagcgggcaaatggaggcagagagtagtgcaatggagcaagccaaaaaggaaatggacgaaggattgaggcagttccagaataggcaagttgcgaacgccctctttgccgttcttagcgctgtagctcagattgggcttgcattccttacggctggtgcaacggctcctggagctgtggcgtcggcggggcaagctgtgagcatagcaggtcaggcggcgcaaggtctgcgaagggtggtggaaattctagagcagctggaggctgtgatggaggttgtggctgctgtgaaggacctcgtggattcattggaacaggtaggtcagattgtggacgcaccggtgatgccggaattgccctcagaggcggactggtccatttttgtgaacgaggtggaggccgtggcagagggcatgccaacggaagtctcggaggttccggtgtggatggtcaagtgcaagaatgtggctgcactgggtcgggagatgagcatcacggcagtacagatgtcggagctgcagtatgacatctgggtgcaaggcatgatgcgggatatggctcgaagccaggcagacaggctggccgcaattcaacccgcggaccttaccaactatttggagatggctacccagatggatatgcggactacgaggatgctgctggggctcctcaacatattgcgcatccagaatgcggcgctcaggtacgagtatcttctaatgcccacggagctcacaacatggccactgggtatggataccgtgggtgacttgctcatcgcgcaggagaatgctgcactgataggattaatgcagctagggccctcatctgatttcacgagcaggcatgtggtgaaagacatacctgtgaacttgctgctcgatggcgaggattgggagtttgagattcctgtgcaagctggcatgtccagcttcccttccagctggtctcgcgtccgtattcggcacctggagatgcactttgtgaaggaggccagcggtattggtggtgagattatccaccagcctaccacccagactgggaccgtttacatccttctgcagggttccactatcttccatgaccgcagaagagaccaggtgttgccttttcaggccgctgctccgctcaactaccattacgcgtaccgcctcgacaccggcgactccactctcacaaacgaaccctctgaacagtttgccaacaagttcatgcagatgacacccttcacccgttggaggcttcgtctgtctgcgtccgcaaaagagaatgcaggattagcctttcccacggctacagcacttgactccactacccagattgtcatcactttccatgttacggccatcagacaaattgactggcggcacgacgaagag

SEQ ID NO: 389 - DNA, 2601 bp, synthetic construct
  misc_feature 1..2601: note = Synthetic
  source 1..2601: mol_type = other DNA
atggctctcgtggattacggcaagcttttcgaggatctgaaccagataagcatgggtgtactggatcgggtagagttttcagaggtgatggtgatccacaggatgtatgtgaggctagctgatctgaatgtggggcagctcgagggagccgagaaagtgaggcacttgtatatttttagcgacgttgtcgagctaccagtcgtggaatggcggtggccgccgcaaataccaggatcggtgacggtgatcatattgtgtcgtcttcttcaatggccaactgatgggaggcagtcggacaccgagctccacctgacattcatgaagttgcatgccatacaacgagaggaaaatcggtgggagataaccgcagcagatggcatgaactggggagtttacatacacgcagaggaagtacaggttggcgtgctgacaatgtcatggtcttcggtacttagagtttcggcacttcgctctgttataacctccggctttcgcgccgttagtgtgtttgaggtaccgggaagtgtaaggtccacccttggagctactttaaggcccgatcacgccttatatagtacaactatgcaagccacacccaacgcatcgcatattagtgcttttaaccttcgcatagtttccccgtcggcatatcgtgtttgtcctctccaaaatgacacagatacctacttaggtattccagcagacgtggcggcagttcttccagtagacgtggtgactgatcctaacatcttgctgggcatgcagacaacggtacacattgcggagctagtcaaggcatgtcatccgtcacccgatgttgtgagcgctgtaggggagcacctgaactggctcaacaaactcttactcccacttaaggaatcgactcagttgcaaggaagcgagtcgtacaaggagtgccttgcactcttgggtcgtgttcacgctgcgatgaagatggtgagaattggcttagtagtgccccagctgcaatacagaatgtacggtagcctcatcaaccaaatggcccaagtagcacaaaactacgaccgagaattcaagcaattcaaattattcatcatccaaaatcaaatccttggcagctatttgctgcagcagaacagggcatttgctgagagggagctgcagatggagagctttcatgctgctgtcatttctcaaagaagggaggagttggacaatacattcgcaaagatggaccgattgagcgggcaaatggaggcagagagtagtgcaatggagcaagccaaaaaggaaatggacgaaggattgaggcagttccagaataggcaagttgcgaacgccctctttgccgttcttagcgctgtagctcagattgggcttgcattccttacggctggtgcaacggctcctggagctgtggcgtcggcggggcaagctgtgagcatagcaggtcaggcggcgcaaggtctgcgaagggtggtggaaattctagagcagctggaggctgtgatggaggttgtggctgctgtgaatgacctcgtggattcattggaacaggtaggtcagattgtggacgcaccggtgatgccggaattgccctcagaggcggactggtccatttttgtgaacgaggtggaggccgtggcagagggcatgccaacggaagtctcggaggttccggtgtggaggggcaagtgcaagagcgtggctgcactgggtcgggagatgagcatcacggcagtacagatgtcggagctgcagtatgacatctgggtgcaaggcatgatgcgggatatggctcgaagccaggcagacaggctggccgcaattcaacccgcggaccttaccaactatttggagatggctacccagatggatatgcggactacgaggatgctgctggggctcctcaacatattgcgcatccagaatgcggcgctcaggtacgagtatcttctaatgcccacggagctcacaacatggccactgggtatggataccgtgggtgacttgctcatcgcgcaggagaatgctgcactgataggattaatgcagctagggccctcatctgatttcacgagcaggcatgtggtgaaagacatacctgtgaacttgctgctcgatggcgaggattgggagtttgagattcctgtgcaagctggcatgtccagcttcccttccagctggtctcgcgtccgtattcggcacctggagatgcactttgtgaaggaggccagcggtattggtggtgagattatccaccagcctaccacccagactgggaccgtttacatccttctgcagggttccactatcttccatgaccgcagaagagaccaggtgttgccttttcaggccgctgctccgctcaactaccattacgcgtaccgcctcgacaccggcgactccactctcacaaacgaaccctctgaacagtttgccaacaagttcatgcagatgacacccttcacccgttggaggcttcgtctgtctgcgtccgcaaaagagaatgcaggattagcctttcccacggctacagcacttgactccactacccagattgtcatcactttccatgttacggccatcagacaaattgactggcggcacgacgaagag

SEQ ID NO: 390 - DNA, 2601 bp, synthetic construct
  misc_feature 1..2601: note = Synthetic
  source 1..2601: mol_type = other DNA
atggctctcgtggattacggcaagcttttcgaggatctgaaccagataagcatgggtgtactggatcgggtagagttttcagaggtgatggtgatccacaggatgtatgtgaggctagctgatctgaatgtggggcagctcgagggagccgagaaagtgaggcagttgtatgttttttgcgacgttctcgtgctaccagtcgtggaatggcggtggccgccgcaaataccaggatcggtgacggtgatcatattgtgtcgtcttcttcaatggccaactgatgggaggcagtcggacaccgagctccacctgacattcatgaagttgcatgccatacaacgagaggaaaatcggtgggagataaccgcagcagatggcatgaactggggagtttacatacacgcagaggaagtacaggttggcgtgctgacaatgtcatggtcttcggtacttagagtttcggcacttcgctctgttataacctccggctttcgcgccgttagtgtgtttgaggtaccgggaagtgtaaggtccacccttggagctactttaaggcccgatcacgccttatatagtacaactatgcaagccacacccaacgcatcgcatattagtgcttttaaccttcgcatagtttccccgtcggcatatcgtgtttgtcctctccaaaatgacacagatacctacttaggtattccagcagacgtggcggcagttcttccagtagacgtggtgactgatcctaacatcttgctgggcatgcagacaacggtacacattgcggagctagtcaaggcatgtcatccgtcacccgatgttgtgagcgctgtaggggagcacctgaactggctcaacaaactcttactcccacttaaggaatcgactcagttgcaaggaagcgagtcgtacaaggagtgccttgcactcttgggtcgtgttcacgctgcgatgaagatggtgagaattggcttagtagtgccccagctgcaatacagaatgtacggtagcctcatcaaccaaatggcccaagtagcacaaaactacgaccgagaattcaagcaattcaaattattcatcatccaaaatcaaatccttggcagctatttgctgcagcagaacagggcatttgctgagagggagctgcagatggagagctttcatgctgctgtcatttctcaaagaagggaggagttggacaatacattcgcaaagatggaccgattgagcgggcaaatggaggcagagagtagtgcaatggagcaagccaaaaaggaaatggacgaaggattgaggcagttccagaataggcaagttgcgaacgccctctttgccgttcttagcgctgtagctcagattgggcttgcattccttacggctggtgcaacggctcctggagctgtggcgtcggcggggcaagctgtgagcatagcaggtcaggcggcgcaaggtctgcgaagggtggtggaaattctagagcagctggaggctgtgatggaggttgtggctgctgtgaaggacctcgtggattcattggaacaggtaggtcagattgtggacgcaccggtgatgccggaattgccctcagaggcggactggtccatttttgtgaacgaggtggaggccgtggcagagggcatgccaacggaagtctcggaggttccggtgtggcacggcaagtgcaagaatgtggctgcactgggtcgggagatgagcatcacggcagtacagatgtcggagctgcagtatgacatctgggtgcaaggcatgatgcgggatatggctcgaagccaggcagacaggctggccgcaattcaacccgcggaccttaccaactatttggagatggctacccagatggatatgcggactacgaggatgctgctggggctcctcaacatattgcgcatccagaatgcggcgctcaggtacgagtatcttctaatgcccacggagctcacaacatggccactgggtatggataccgtgggtgacttgctcatcgcgcaggagaatgctgcactgataggattaatgcagctagggccctcatctgatttcacgagcaggcatgtggtgaaagacatacctgtgaacttgctgctcgatggcgaggattgggagtttgagattcctgtgcaagctggcatgtccagcttcccttccagctggtctcgcgtccgtattcggcacctggagatgcactttgtgaaggaggccagcggtattggtggtgagattatccaccagcctaccacccagactgggaccgtttacatccttctgcagggttccactatcttccatgaccgcagaagagaccaggtgttgccttttcaggccgctgctccgctcaactaccattacgcgtaccgcctcgacaccggcgactccactctcacaaacgaaccctctgaacagtttgccaacaagttcatgcagatgacacccttcacccgttggaggcttcgtctgtctgcgtccgcaaaagagaatgcaggattagcctttcccacggctacagcacttgactccactacccagattgtcatcactttccatgttacggccatcagacaaattgactggcggcacgacgaagag

SEQ ID NO: 391 - DNA, 2601 bp, synthetic construct
  misc_feature 1..2601: note = Synthetic
  source 1..2601: mol_type = other DNA
atggctctcgtggattacggcaagcttttcgaggatctgaaccagataagcatgggtgtactggatcgggtagagttttcagaggtgatggtgatccacaggatgtatgtgaggctagctgatctgaatgtggggcagctcgagggagccgagaaagtgaggcagttgtatgttttttgcgacgttctcgtgctaccagtcgtggaatggcggtggccgccgcaaataccaggatcggtgacggtgatcatattgtgtcgtcttcttcaatggccaactgatgggaggcagtcggacaccgagctccacctgacattcatgaagttgcatgccatacaacgagaggaaaatcggtgggagataaccgcagcagatggcatgaactggggagtttacatacacgcagaggaagtacaggttggcgtgctgacaatgtcatggtcttcggtacttagagtttcggcacttcgctctgttataacctccggctttcgcgccgttagtgtgtttgaggtaccgggaagtgtaaggtccacccttggagctactttaaggcccgatcacgccttatatagtacaactatgcaagccacacccaacgcatcgcatattagtgcttttaaccttcgcatagtttccccgtcggcatatcgtgtttgtcctctccaaaatgacacagatacctacttaggtattccagcagacgtggcggcagttcttccagtagacgtggtgactgatcctaacatcttgctgggcatgcagacaacggtacacattgcggagctagtcaaggcatgtcatccgtcacccgatgttgtgagcgctgtaggggagcacctgaactggctcaacaaactcttactcccacttaaggaatcgactcagttgcaaggaagcgagtcgtacaaggagtgccttgcactcttgggtcgtgttcacgctgcgatgaagatggtgagaattggcttagtagtgccccagctgcaatacagaatgtacggtagcctcatcaaccaaatggcccaagtagcacaaaactacgaccgagaattcaagcaattcaaattattcatcatccaaaatcaaatccttggcagctatttgctgcagcagaacagggcatttgctgagagggagctgcagatggagagctttcatgctgctgtcatttctcaaagaagggaggagttggacaatacattcgcaaagatggaccgattgagcgggcaaatggaggcagagagtagtgcaatggagcaagccaaaaaggaaatggacgaaggattgaggcagttccagaataggcaagttgcgaacgccctctttgccgttcttagcgctgtagctcagattgggcttgcattccttacggctggtgcaacggctcctggagctgtggcgtcggcggggcaagctgtgagcatagcaggtcaggcggcgcaaggtctgcgaagggtggtggaaattctagagcagctggaggctgtgatggaggttgtggctgctgtgaaggacctcgtggattcattggaacaggtaggtcagattgtggacgcaccggtgatgccggaattgccctcagaggcggactggtccatttttgtgaacgaggtggaggccgtggcagagggcatgccaacggaagtctcggaggttccggtgtggctgggccggtgcaagaatgtggctgcactgggtcgggagatgagcatcacggcagtacagatgtcggagctgcagtatgacatctgggtgcaaggcatgatgcgggatatggctcgaagccaggcagacaggctggccgcaattcaacccgcggaccttaccaactatttggagatggctacccagatggatatgcggactacgaggatgctgctggggctcctcaacatattgcgcatccagaatgcggcgctcaggtacgagtatcttctaatgcccacggagctcacaacatggccactgggtatggataccgtgggtgacttgctcatcgcgcaggagaatgctgcactgataggattaatgcagctagggccctcatctgatttcacgagcaggcatgtggtgaaagacatacctgtgaacttgctgctcgatggcgaggattgggagtttgagattcctgtgcaagctggcatgtccagcttcccttccagctggtctcgcgtccgtattcggcacctggagatgcactttgtgaaggaggccagcggtattggtggtgagattatccaccagcctaccacccagactgggaccgtttacatccttctgcagggttccactatcttccatgaccgcagaagagaccaggtgttgccttttcaggccgctgctccgctcaactaccattacgcgtaccgcctcgacaccggcgactccactctcacaaacgaaccctctgaacagtttgccaacaagttcatgcagatgacacccttcacccgttggaggcttcgtctgtctgcgtccgcaaaagagaatgcaggattagcctttcccacggctacagcacttgactccactacccagattgtcatcactttccatgttacggccatcagacaaattgactggcggcacgacgaagag

SEQ ID NO: 392 - DNA, 2601 bp, synthetic construct
  misc_feature 1..2601: note = Synthetic
  source 1..2601: mol_type = other DNA
atagctctcgtggattacggcaagcttttcgaggatctgaaccagataagcatgggtgtactggatcgggtagagttttcagaggtgatggtgatccacaggatgtatgtgaggctagctgatctgaatgtggggcagctcgagggagccgagaaagtgaggcagttgtatgttttttgcgacgttctcgtgctaccagtcgtggaatggcggtggccgccgcaaataccaggatcggtgacggtgatcatattgtgtcgtcttcttcaatggccaactgatgggaggcagtcggacaccgagctccacctgacattcatgaagttgcatgccatacaacgagaggaaaatcggtgggagataaccgcagcagatggcatgaactggggagtttacatacacgcagaggaagtacaggttggcgtgctgacaatgtcatggtcttcggtacttagagtttcggcacttcgctctgttataacctccggctttcgcgccgttagtgtgtttgaggtaccgggaagtgtaaggtccacccttggagctactttaaggcccgatcacgccttatatagtacaactatgcaagccacacccaacgcatcgcatattagtgcttttaaccttcgcatagtttccccgtcggcatatcgtgtttgtcctctccaaaatgacacagatacctacttaggtattccagcagacgtggcggcagttcttccagtagacgtggtgactgatcctaacatcttgctgggcatgcagacaacggtacacattgcggagctagtcaaggcatgtcatccgtcacccgatgttgtgagcgctgtaggggagcacctgaactggctcaacaaactcttactcccacttaaggaatcgactcagttgcaaggaagcgagtcgtacaaggagtgccttgcactcttgggtcgtgttcacgctgcgatgaagatggtgagaattggcttagtagtgccccagctgcaatacagaatgtacggtagcctcatcaaccaaatggcccaagtagcacaaaactacgaccgagaattcaagcaattcaaattattcatcatccaaaatcaaatccttggcagctatttgctgcagcagaacagggcatttgctgagagggagctgcagatggagagctttcatgctgctgtcatttctcaaagaagggaggagttggacaatacattcgcaaagatggaccgattgagcgggcaaatggaggcagagagtagtgcaatggagcaagccaaaaaggaaatggacgaaggattgaggcagttccagaataggcaagttgcgaacgccctctttgccgttcttagcgctgtagctcagattgggcttgcattccttacggctggtgcaacggctcctggagctgtggcgtcggcggggcaagctgtgagcatagcaggtcaggcggcgcaaggtctgcgaagggtggtggaaattctagagcagctggaggctgtgatggaggttgtggctgctgtgaaggacctcgtggattcattggaacaggtaggtcagattgtggacgcaccggtgatgccggaattgccctcagaggcggactggtccatttttgtgaacgaggtggaggccgtggcagagggcatgccaacggaagtctcggaggttccggtgtggaggggcaagtgcaagagcgtggctgcactgggtcgggagatgagcatcacggcagtacagatgtcggagctgcagtatgacatctgggtgcaaggcatgatgcgggatatggctcgaagccaggcagacaggctggccgcaattcaacccgcggaccttaccaactatttggagatggctacccagatggatatgcggactacgaggatgctgctggggctcctcaacatattgcgcatccagaatgcggcgctcaggtacgagtatcttctaatgcccacggagctcacaacatggccactgggtatggataccgtgggtgacttgctcatcgcgcaggagaatgctgcactgataggattaatgcagctagggccctcatctgatttcacgagcaggcatgtggtgaaagacatacctgtgaacttgctgctcgatggcgaggattgggagtttgagattcctgtgcaagctggcatgtccagcttcccttccagctggtctcgcgtccgtattcggcacctggagatgcactttgtgaaggaggccagcggtattggtggtgagattatccaccagcctaccacccagactgggaccgtttacatccttctgcagggttccactatcttccatgaccgcagaagagaccaggtgttgccttttcaggccgctgctccgctcaactaccattacgcgtaccgcctcgacaccggcgactccactctcacaaacgaaccctctgaacagtttgccaacaagttcatgcagatgacacccttcacccgttggaggcttcgtctgtctgcgtccgcaaaagagaatgcaggattagcctttcccacggctacagcacttgactccactacccagattgtcatcactttccatgttacggccatcagacaaattgactggcggcacgacgaagag

SEQ ID NO: 393 - DNA, 2601 bp, synthetic construct
  misc_feature 1..2601: note = Synthetic
  source 1..2601: mol_type = other DNA
atggctctcgtggattacggcaagcttttcgaggatctgaaccagataagcatgggtgtactggatcgggtagagttttcagaggtgatggtgatccacaggatgtatgtgaggctagctgatctgaatgtggggcagctcgagggagccgagaaagtgaggcggttgtatatttttgccgacattctcgagctaccagtcgtggaatggcggtggccgccgcaaataccaggatcggtgacggtgatcatattgtgtcgtcttcttcaatggccaactgatgggaggcagtcggacaccgagctccacctgacattcatgaagttgcatgccatacaacgagaggaaaatcggtgggagataaccgcagcagatggcatgaactggggagtttacatacacgcagaggaagtacaggttggcgtgctgacaatgtcatggtcttcggtacttagagtttcggcacttcgctctgttataacctccggctttcgcgccgttagtgtgtttgaggtaccgggaagtgtaaggtccacccttggagctactttaaggcccgatcacgccttatatagtacaactatgcaagccacacccaacgcatcgcatattagtgcttttaaccttcgcatagtttccccgtcggcatatcgtgtttgtcctctccaaaatgacacagatacctacttaggtattccagcagacgtggcggcagttcttccagtagacgtggtgactgatcctaacatcttgctgggcatgcagacaacggtacacattgcggagctagtcaaggcatgtcatccgtcacccgatgttgtgagcgctgtaggggagcacctgaactggctcaacaaactcttactcccacttaaggaatcgactcagttgcaaggaagcgagtcgtacaaggagtgccttgcactcttgggtcgtgttcacgctgcgatgaagatggtgagaattggcttagtagtgccccagctgcaatacagaatgtacggtagcctcatcaaccaaatggcccaagtagcacaaaactacgaccgagaattcaagcaattcaaattattcatcatccaaaatcaaatccttggcagctatttgctgcagcagaacagggcatttgctgagagggagctgcagatggagagctttcatgctgctgtcatttctcaaagaagggaggagttggacaatacattcgcaaagatggaccgattgagcgggcaaatggaggcagagagtagtgcaatggagcaagccaaaaaggaaatggacgaaggattgaggcagttccagaataggcaagttgcgaacgccctctttgccgttcttagcgctgtagctcagattgggcttgcattccttacggctggtgcaacggctcctggagctgtggcgtcggcggggcaagctgtgagcatagcaggtcaggcggcgcaaggtctgcgaagggtggtggaaattctagagcagctggaggctgtgatggaggttgtggctgctgtgaaggacctcgtggattcattggaacaggtaggtcagattgtggacgcaccggtgatgccggaattgccctcagaggcggactggtccatttttgtgaacgaggtggaggccgtggcagagggcatgccaacggaagtctcggaggttccggtgtggatggtcaagtgcaagaatgtggctgcactgggtcgggagatgagcatcacggcagtacagatgtcggagctgcagtatgacatctgggtgcaaggcatgatgcgggatatggctcgaagccaggcagacaggctggccgcaattcaacccgcggaccttaccaactatttggagatggctacccagatggatatgcggactacgaggatgctgctggggctcctcaacatattgcgcatccagaatgcggcgctcaggtacgagtatcttctaatgcccacggagctcacaacatggccactgggtatggataccgtgggtgacttgctcatcgcgcaggagaatgctgcactgataggattaatgcagctagggccctcatctgatttcacgagcaggcatgtggtgaaagacatacctgtgaacttgctgctcgatggcgaggattgggagtttgagattcctgtgcaagctggcatgtccagcttcccttccagctggtctcgcgtccgtattcggcacctggagatgcactttgtgaaggaggccagcggtattggtggtgagattatccaccagcctaccacccagactgggaccgtttacatccttctgcagggttccactatcttccatgaccgcagaagagaccaggtgttgccttttcaggccgctgctccgctcaactaccattacgcgtaccgcctcgacaccggcgactccactctcacaaacgaaccctctgaacagtttgccaacaagttcatgcagatgacacccttcacccgttggaggcttcgtctgtctgcgtccgcaaaagagaatgcaggattagcctttcccacggctacagcacttgactccactacccagattgtcatcactttccatgttacggccatcagacaaattgactggcggcacgacgaagag

SEQ ID NO: 394 - DNA, 2601 bp, synthetic construct
  misc_feature 1..2601: note = Synthetic
  source 1..2601: mol_type = other DNA
atggctctcgtggattacggcaagcttttcgaggatctgaaccagataagcatgggtgtactggatcgggtagagttttcagaggtgatggtgatccacaggatgtatgtgaggctagctgatctgaatgtggggcagctcgagggagccgagaaagtgaggcgcttgtatgttttttgcgacgttgtcgtgctaccagtcgtggaatggcggtggccgccgcaaataccaggatcggtgacggtgatcatattgtgtcgtcttcttcaatggccaactgatgggaggcagtcggacaccgagctccacctgacattcatgaagttgcatgccatacaacgagaggaaaatcggtgggagataaccgcagcagatggcatgaactggggagtttacatacacgcagaggaagtacaggttggcgtgctgacaatgtcatggtcttcggtacttagagtttcggcacttcgctctgttataacctccggctttcgcgccgttagtgtgtttgaggtaccgggaagtgtaaggtccacccttggagctactttaaggcccgatcacgccttatatagtacaactatgcaagccacacccaacgcatcgcatattagtgcttttaaccttcgcatagtttccccgtcggcatatcgtgtttgtcctctccaaaatgacacagatacctacttaggtattccagcagacgtggcggcagttcttccagtagacgtggtgactgatcctaacatcttgctgggcatgcagacaacggtacacattgcggagctagtcaaggcatgtcatccgtcacccgatgttgtgagcgctgtaggggagcacctgaactggctcaacaaactcttactcccacttaaggaatcgactcagttgcaaggaagcgagtcgtacaaggagtgccttgcactcttgggtcgtgttcacgctgcgatgaagatggtgagaattggcttagtagtgccccagctgcaatacagaatgtacggtagcctcatcaaccaaatggcccaagtagcacaaaactacgaccgagaattcaagcaattcaaattattcatcatccaaaatcaaatccttggcagctatttgctgcagcagaacagggcatttgctgagagggagctgcagatggagagctttcatgctgctgtcatttctcaaagaagggaggagttggacaatacattcgcaaagatggaccgattgagcgggcaaatggaggcagagagtagtgcaatggagcaagccaaaaaggaaatggacgaaggattgaggcagttccagaataggcaagttgcgaacgccctctttgccgttcttagcgctgtagctcagattgggcttgcattccttacggctggtgcaacggctcctggagctgtggcgtcggcggggcaagctgtgagcatagcaggtcaggcggcgcaaggtctgcgaagggtggtggaaattctagagcagctggaggctgtgatggaggttgtggctgctgtgaaggacctcgtggattcattggaacaggtaggtcagattgtggacgcaccggtgatgccggaattgccctcagaggcggactggtccatttttgtgaacgaggtggaggccgtggcagagggcatgccaacggaagtctcggaggttccggtgtggagggccaggtgcaagaatgtggctgcactgggtcgggagatgagcatcacggcagtacagatgtcggagctgcagtatgacatctgggtgcaaggcatgatgcgggatatggctcgaagccaggcagacaggctggccgcaattcaacccgcggaccttaccaactatttggagatggctacccagatggatatgcggactacgaggatgctgctggggctcctcaacatattgcgcatccagaatgcggcgctcaggtacgagtatcttctaatgcccacggagctcacaacatggccactgggtatggataccgtgggtgacttgctcatcgcgcaggagaatgctgcactgataggattaatgcagctagggccctcatctgatttcacgagcaggcatgtggtgaaagacatacctgtgaacttgctgctcgatggcgaggattgggagtttgagattcctgtgcaagctggcatgtccagcttcccttccagctggtctcgcgtccgtattcggcacctggagatgcactttgtgaaggaggccagcggtattggtggtgagattatccaccagcctaccacccagactgggaccgtttacatccttctgcagggttccactatcttccatgaccgcagaagagaccaggtgttgccttttcaggccgctgctccgctcaactaccattacgcgtaccgcctcgacaccggcgactccactctcacaaacgaaccctctgaacagtttgccaacaagttcatgcagatgacacccttcacccgttggaggcttcgtctgtctgcgtccgcaaaagagaatgcaggattagcctttcccacggctacagcacttgactccactacccagattgtcatcactttccatgttacggccatcagacaaattgactggcggcacgacgaagag

SEQ ID NO: 395 - DNA, 2601 bp, synthetic construct
  misc_feature 1..2601: note = Synthetic
  source 1..2601: mol_type = other DNA
atggctctcgtggattacggcaagcttttcgaggatctgaaccagataagcatgggtgtactggatcgggtagagttttcagaggtgatggtgatccacaggatgtatgtgaggctagctgatctgaatgtggggcagctcgagggagccgagaaagtgaggcggttgtatgtttttaccgacgttctcgtgctaccagtcgtggaatggcggtggccgccgcaaataccaggatcggtgacggtgatcatattgtgtcgtcttcttcaatggccaactgatgggaggcagtcggacaccgagctccacctgacattcatgaagttgcatgccatacaacgagaggaaaatcggtgggagataaccgcagcagatggcatgaactggggagtttacatacacgcagaggaagtacaggttggcgtgctgacaatgtcatggtcttcggtacttagagtttcggcacttcgctctgttataacctccggctttcgcgccgttagtgtgtttgaggtaccgggaagtgtaaggtccacccttggagctactttaaggcccgatcacgccttatatagtacaactatgcaagccacacccaacgcatcgcatattagtgcttttaaccttcgcatagtttccccgtcggcatatcgtgtttgtcctctccaaaatgacacagatacctacttaggtattccagcagacgtggcggcagttcttccagtagacgtggtgactgatcctaacatcttgctgggcatgcagacaacggtacacattgcggagctagtcaaggcatgtcatccgtcacccgatgttgtgagcgctgtaggggagcacctgaactggctcaacaaactcttactcccacttaaggaatcgactcagttgcaaggaagcgagtcgtacaaggagtgccttgcactcttgggtcgtgttcacgctgcgatgaagatggtgagaattggcttagtagtgccccagctgcaatacagaatgtacggtagcctcatcaaccaaatggcccaagtagcacaaaactacgaccgagaattcaagcaattcaaattattcatcatccaaaatcaaatccttggcagctatttgctgcagcagaacagggcatttgctgagagggagctgcagatggagagctttcatgctgctgtcatttctcaaagaagggaggagttggacaatacattcgcaaagatggaccgattgagcgggcaaatggaggcagagagtagtgcaatggagcaagccaaaaaggaaatggacgaaggattgaggcagttccagaataggcaagttgcgaacgccctctttgccgttcttagcgctgtagctcagattgggcttgcattccttacggctggtgcaacggctcctggagctgtggcgtcggcggggcaagctgtgagcatagcaggtcaggcggcgcaaggtctgcgaagggtggtggaaattctagagcagctggaggctgtgatggaggttgtggctgctgtgaaggacctcgtggattcattggaacaggtaggtcagattgtggacgcaccggtgatgccggaattgccctcagaggcggactggtccatttttgtgaacgaggtggaggccgtggcagagggcatgccaacggaagtctcggaggttccggtgtggatcggcaagtgcaagaatgtggctgcactgggtcgggagatgagcatcacggcagtacagatgtcggagctgcagtatgacatctgggtgcaaggcatgatgcgggatatggctcgaagccaggcagacaggctggccgcaattcaacccgcggaccttaccaactatttggagatggctacccagatggatatgcggactacgaggatgctgctggggctcctcaacatattgcgcatccagaatgcggcgctcaggtacgagtatcttctaatgcccacggagctcacaacatggccactgggtatggataccgtgggtgacttgctcatcgcgcaggagaatgctgcactgataggattaatgcagctagggccctcatctgatttcacgagcaggcatgtggtgaaagacatacctgtgaacttgctgctcgatggcgaggattgggagtttgagattcctgtgcaagctggcatgtccagcttcccttccagctggtctcgcgtccgtattcggcacctggagatgcactttgtgaaggaggccagcggtattggtggtgagattatccaccagcctaccacccagactgggaccgtttacatccttctgcagggttccactatcttccatgaccgcagaagagaccaggtgttgccttttcaggccgctgctccgctcaactaccattacgcgtaccgcctcgacaccggcgactccactctcacaaacgaaccctctgaacagtttgccaacaagttcatgcagatgacacccttcacccgttggaggcttcgtctgtctgcgtccgcaaaagagaatgcaggattagcctttcccacggctacagcacttgactccactacccagattgtcatcactttccatgttacggccatcagacaaattgactggcggcacgacgaagag

SEQ ID NO: 396 - DNA, 2601 bp, synthetic construct
  misc_feature 1..2601: note = Synthetic
  source 1..2601: mol_type = other DNA
atggctctcgtggattacggcaagcttttcgaggatctgaaccagataagcatgggtgtactggatcgggtagagttttcagaggtgatggtgatccacaggatgtatgtgaggctagctgatctgaatgtggggcagctcgagggagccgagaaagtgaggcggttgtatgtttttaccgacgttctcgtgctaccagtcgtggaatggcggtggccgccgcaaataccaggatcggtgacggtgatcatattgtgtcgtcttcttcaatggccaactgatgggaggcagtcggacaccgagctccacctgacattcatgaagttgcatgccatacaacgagaggaaaatcggtgggagataaccgcagcagatggcatgaactggggagtttacatacacgcagaggaagtacaggttggcgtgctgacaatgtcatggtcttcggtacttagagtttcggcacttcgctctgttataacctccggctttcgcgccgttagtgtgtttgaggtaccgggaagtgtaaggtccacccttggagctactttaaggcccgatcacgccttatatagtacaactatgcaagccacacccaacgcatcgcatattagtgcttttaaccttcgcatagtttccccgtcggcatatcgtgtttgtcctctccaaaatgacacagatacctacttaggtattccagcagacgtggcggcagttcttccagtagacgtggtgactgatcctaacatcttgctgggcatgcagacaacggtacacattgcggagctagtcaaggcatgtcatccgtcacccgatgttgtgagcgctgtaggggagcacctgaactggctcaacaaactcttactcccacttaaggaatcgactcagttgcaaggaagcgagtcgtacaaggagtgccttgcactcttgggtcgtgttcacgctgcgatgaagatggtgagaattggcttagtagtgccccagctgcaatacagaatgtacggtagcctcatcaaccaaatggcccaagtagcacaaaactacgaccgagaattcaagcaattcaaattattcatcatccaaaatcaaatccttggcagctatttgctgcagcagaacagggcatttgctgagagggagctgcagatggagagctttcatgctgctgtcatttctcaaagaagggaggagttggacaatacattcgcaaagatggaccgattgagcgggcaaatggaggcagagagtagtgcaatggagcaagccaaaaaggaaatggacgaaggattgaggcagttccagaataggcaagttgcgaacgccctctttgccgttcttagcgctgtagctcagattgggcttgcattccttacggctggtgcaacggctcctggagctgtggcgtcggcggggcaagctgtgagcatagcaggtcaggcggcgcaaggtctgcgaagggtggtggaaattctagagcagctggaggctgtgatggaggttgtggctgctgtgaaggacctcgtggattcattggaacaggtaggtcagattgtggacgcaccggtgatgccggaattgccctcagaggcggactggtccatttttgtgaacgaggtggaggccgtggcagagggcatgccaacggaagtctcggaggttccggtgtggagggccaggtgcaagaatgtggctgcactgggtcgggagatgagcatcacggcagtacagatgtcggagctgcagtatgacatctgggtgcaaggcatgatgcgggatatggctcgaagccaggcagacaggctggccgcaattcaacccgcggaccttaccaactatttggagatggctacccagatggatatgcggactacgaggatgctgctggggctcctcaacatattgcgcatccagaatgcggcgctcaggtacgagtatcttctaatgcccacggagctcacaacatggccactgggtatggataccgtgggtgacttgctcatcgcgcaggagaatgctgcactgataggattaatgcagctagggccctcatctgatttcacgagcaggcatgtggtgaaagacatacctgtgaacttgctgctcgatggcgaggattgggagtttgagattcctgtgcaagctggcatgtccagcttcccttccagctggtctcgcgtccgtattcggcacctggagatgcactttgtgaaggaggccagcggtattggtggtgagattatccaccagcctaccacccagactgggaccgtttacatccttctgcagggttccactatcttccatgaccgcagaagagaccaggtgttgccttttcaggccgctgctccgctcaactaccattacgcgtaccgcctcgacaccggcgactccactctcacaaacgaaccctctgaacagtttgccaacaagttcatgcagatgacacccttcacccgttggaggcttcgtctgtctgcgtccgcaaaagagaatgcaggattagcctttcccacggctacagcacttgactccactacccagattgtcatcactttccatgttacggccatcagacaaattgactggcggcacgacgaagag

SEQ ID NO: 397 - DNA, 2601 bp, synthetic construct
  misc_feature 1..2601: note = Synthetic
  source 1..2601: mol_type = other DNA
atggctctcgtggattacggcaagcttttcgaggatctgaaccagataagcatgggtgtactggatcgggtagagttttcagaggtgatggtgatccacaggatgtatgtgaggctagctgatctgaatgtggggcagctcgagggagccgagaaagtgaggcggttgtatgtttttaccgacgttctcgtgctaccagtcgtggaatggcggtggccgccgcaaataccaggatcggtgacggtgatcatattgtgtcgtcttcttcaatggccaactgatgggaggcagtcggacaccgagctccacctgacattcatgaagttgcatgccatacaacgagaggaaaatcggtgggagataaccgcagcagatggcatgaactggggagtttacatacacgcagaggaagtacaggttggcgtgctgacaatgtcatggtcttcggtacttagagtttcggcacttcgctctgttataacctccggctttcgcgccgttagtgtgtttgaggtaccgggaagtgtaaggtccacccttggagctactttaaggcccgatcacgccttatatagtacaactatgcaagccacacccaacgcatcgcatattagtgcttttaaccttcgcatagtttccccgtcggcatatcgtgtttgtcctctccaaaatgacacagatacctacttaggtattccagcagacgtggcggcagttcttccagtagacgtggtgactgatcctaacatcttgctgggcatgcagacaacggtacacattgcggagctagtcaaggcatgtcatccgtcacccgatgttgtgagcgctgtaggggagcacctgaactggctcaacaaactcttactcccacttaaggaatcgactcagttgcaaggaagcgagtcgtacaaggagtgccttgcactcttgggtcgtgttcacgctgcgatgaagatggtgagaattggcttagtagtgccccagctgcaatacagaatgtacggtagcctcatcaaccaaatggcccaagtagcacaaaactacgaccgagaattcaagcaattcaaattattcatcatccaaaatcaaatccttggcagctatttgctgcagcagaacagggcatttgctgagagggagctgcagatggagagctttcatgctgctgtcatttctcaaagaagggaggagttggacaatacattcgcaaagatggaccgattgagcgggcaaatggaggcagagagtagtgcaatggagcaagccaaaaaggaaatggacgaaggattgaggcagttccagaataggcaagttgcgaacgccctctttgccgttcttagcgctgtagctcagattgggcttgcattccttacggctggtgcaacggctcctggagctgtggcgtcggcggggcaagctgtgagcatagcaggtcaggcggcgcaaggtctgcgaagggtggtggaaattctagagcagctggaggctgtgatggaggttgtggctgctgtgaaggacctcgtggattcattggaacaggtaggtcagattgtggacgcaccggtgatgccggaattgccctcagaggcggactggtccatttttgtgaacgaggtggaggccgtggcagagggcatgccaacggaagtctcggaggttccggtgtggacggtcaagtgcaagaatgtggctgcactgggtcgggagatgagcatcacggcagtacagatgtcggagctgcagtatgacatctgggtgcaaggcatgatgcgggatatggctcgaagccaggcagacaggctggccgcaattcaacccgcggaccttaccaactatttggagatggctacccagatggatatgcggactacgaggatgctgctggggctcctcaacatattgcgcatccagaatgcggcgctcaggtacgagtatcttctaatgcccacggagctcacaacatggccactgggtatggataccgtgggtgacttgctcatcgcgcaggagaatgctgcactgataggattaatgcagctagggccctcatctgatttcacgagcaggcatgtggtgaaagacatacctgtgaacttgctgctcgatggcgaggattgggagtttgagattcctgtgcaagctggcatgtccagcttcccttccagctggtctcgcgtccgtattcggcacctggagatgcactttgtgaaggaggccagcggtattggtggtgagattatccaccagcctaccacccagactgggaccgtttacatccttctgcagggttccactatcttccatgaccgcagaagagaccaggtgttgccttttcaggccgctgctccgctcaactaccattacgcgtaccgcctcgacaccggcgactccactctcacaaacgaaccctctgaacagtttgccaacaagttcatgcagatgacacccttcacccgttggaggcttcgtctgtctgcgtccgcaaaagagaatgcaggattagcctttcccacggctacagcacttgactccactacccagattgtcatcactttccatgttacggccatcagacaaattgactggcggcacgacgaagag

SEQ ID NO: 398 - protein, 867 aa, synthetic construct
  REGION 1..867: note = Synthetic
MALVDYGKLFEDLNQISMGVLDRVEFSEVMVIHRMYVRLADLNVGQLEGAEKVKHLYIFTDVLELPVVEWRWPPQIPGSVTVIILCRLLQWPTDGRQSDTELHLTFMKLHAIQREENRWEITAADGMNWGVYIHAEEVQVGVLTMSWSSVLRVSALRSVITSGFRAVSVFEVPGSVRSTLGATLRPDHALYSTTMQATPNASHISAFNLRIVSPSAYRVCPLQNDTDTYLGIPADVAAVLPVDVVTDPNILLGMQTTVHIAELVKACHPSPDVVSAVGEHLNWLNKLLLPLKESTQLQGSESYKECLALLGRVHAAMKMVRIGLVVPQLQYRMYGSLINQMAQVAQNYDREFKQFKLFIIQNQILGSYLLQQNRAFAERELQMESFHAAVISQRREELDNTFAKMDRLSGQMEAESSAMEQAKKEMDEGLRQFQNRQVANALFAVLSAVAQIGLAFLTAGATAPGAVASAGQAVSIAGQAAQGLRRVVEILEQLEAVMEVVAAVKDLVDSLEQVGQIVDAPVMPELPSEADWFIFVNEVEAVAEGMPTEVSEVPVWHGKCKNVAALGREMSITAVQMSELQYDIWVQGMMRDMARSQADRLAAIQPADLTNYLEMATQMDMRTTRMLLGLLNILRIQNAALRYEYLLMPTELTTWPLGMDTVGDLLIAQENAALIGLMQLGPSSDFTSRHVVKDIPVNLLLDGEDWEFEIPVQAGMSSFPSSWSRVRIRHLEMHFVKEASGIGGEIIHQPTTQTGTVYILLQGSTIFHDRRRDQVLPFQAAAPLNYHYAYRLDTGDSTLTNEPSEQFANKFMQMTPFTRWRLRLSASAKENAGLAFPTATALDSTTQIVITFHVTAIRQIDWRHDEE

SEQ ID NO: 399 - protein, 867 aa, synthetic construct
  REGION 1..867: note = Synthetic
MALVDYGKLFEDLNQISMGVLDRVEFSEVMVIHRMYVRLADLNVGQLEGAEKVKHLYIFTDVLELPVVEWRWPPQIPGSVTVIILCRLLQWPTDGRQSDTELHLTFMKLHAIQREENRWEITAADGMNWGVYIHAEEVQVGVLTMSWSSVLRVSALRSVITSGFRAVSVFEVPGSVRSTLGATLRPDHALYSTTMQATPNASHISAFNLRIVSPSAYRVCPLQNDTDTYLGIPADVAAVLPVDVVTDPNILLGMQTTVHIAELVKACHPSPDVVSAVGEHLNWLNKLLLPLKESTQLQGSESYKECLALLGRVHAAMKMVRIGLVVPQLQYRMYGSLINQMAQVAQNYDREFKQFKLFIIQNQILGSYLLQQNRAFAERELQMESFHAAVISQRREELDNTFAKMDRLSGQMEAESSAMEQAKKEMDEGLRQFQNRQVANALFAVLSAVAQIGLAFLTAGATAPGAVASAGQAVSIAGQAAQGLRRVVEILEQLEAVMEVVAAVKDLVDSLEQVGQIVDAPVMPELPSEADWSIFVNEVEAVAEGMPTEVSEVPVWLARCKNVAALGREMSITAVQMSELQYDIWVQGMMRDMARSQADRLAAIQPADLTNYLEMATQMDMRTTRMLLGLLNILRIQNAALRYEYLLMPTELTTWPLGMDTVGDLLIAQENAALIGLMQLGPSSDFTSRHVVKDIPVNLLLDGEDWEFEIPVQAGMSSFPSSWSRVRIRHLEMHFVKEASGIGGEIIHQPTTQTGTVYILLQGSTIFHDRRRDQVLPFQAAAPLNYHYAYRLDTGDSTLTNEPSEQFANKFMQMTPFTRWRLRLSASAKENAGLAFPTATALDSTTQIVITFHVTAIRQIDWRHDEE

SEQ ID NO: 400 - protein, 867 aa, synthetic construct
  REGION 1..867: note = Synthetic
MALVDYGKLFEDLNQISMGVLDRVEFSEVMVIHRMYVRLADLNVGQLEGAEKVKHLYIFTDVLELPVVEWRWPPQIPGSVTVIILCRLLQWPTDGRQSDTELHLTFMKLHAIQREENRWEITAADGMNWGVYIHAEEVQVGVLTMSWSSVLRVSALRSVITSGFRAVSVFEVPGSVRSTLGATLRPDHALYSTTMQATPNASHISAFNLRIVSPSAYRVCPLQNDTDTYLGIPADVAAVLPVDVVTDPNILLGMQTTVHIAELVKACHPSPDVVSAVGEHLNWLNKLLLPLKESTQLQGSESYKECLALLGRVHAAMKMVRIGLVVPQLQYRMYGSLINQMAQVAQNYDREFKQFKLFIIQNQILGSYLLQQNRAFAERELQMESFHAAVISQRREELDNTFAKMDRLSGQMEAESSAMEQAKKEMDEGLRQFQNRQVANALFAVLSAVAQIGLAFLTAGATAPGAVASAGQAVSIAGQAAQGLRRVVEILEQLEAVMEVVAAVKDLVDSLEQVGQIVDAPVMPELPSEADWSIFVNEVEAVAEGMPTEVSEVPVWQARCKHVAALGREMSITAVQMSELQYDIWVQGMMRDMARSQADRLAAIQPADLTNYLEMATQMDMRTTRMLLGLLNILRIQNAALRYEYLLMPTELTTWPLGMDTVGDLLIAQENAALIGLMQLGPSSDFTSRHVVKDIPVNLLLDGEDWEFEIPVQAGMSSFPSSWSRVRIRHLEMHFVKEASGIGGEIIHQPTTQTGTVYILLQGSTIFHDRRRDQVLPFQAAAPLNYHYAYRLDTGDSTLTNEPSEQFANKFMQMTPFTRWRLRLSASAKENAGLAFPTATALDSTTQIVITFHVTAIRQIDWRHDEE

SEQ ID NO: 401 - protein, 867 aa, synthetic construct
  REGION 1..867: note = Synthetic
MALVDYGKLFEDLNQISMGVLDRVEFSEVMVIHRMYVRLADLNVGQLEGAEKVKHLYVFADVIELPVVEWRWPPQIPGSVTVIILCRLLQWPTDGRQSDTELHLTFMKLHAIQREENRWEITAADGMNWGVYIHAEEVQVGVLTMSWSSVLRVSALRSVITSGFRAVSVFEVPGSVRSTLGATLRPDHALYSTTMQATPNASHISAFNLRIVSPSAYRVCPLQNDTDTYLGIPADVAAVLPVDVVTDPNILLGMQTTVHIAELVKACHPSPDVVSAVGEHLNWLNKLLLPLKESTQLQGSESYKECLALLGRVHAAMKMVRIGLVVPQLQYRMYGSLINQMAQVAQNYDREFKQFKLFIIQNQILGSYLLQQNRAFAERELQMESFHAAVISQRREELDNTFAKMDRLSGQMEAESSAMEQAKKEMDEGLRQFQNRQVANALFAVLSAVAQIGLAFLTAGATAPGAVASAGQAVSIAGQAAQGLRRVVEILEQLEAVMEVVAAVKDLVDSLEQVGQIVDAPVMPELPSEADWSIFVNEVEAVAEGMPTEVSEVPVWQARCKHVAALGREMSITAVQMSELQYDIWVQGMMRDMARSQADRLAAIQPADLTNYLEMATQMDMRTTRMLLGLLNILRIQNAALRYEYLLMPTELTTWPLGMDTVGDLLIAQENAALIGLMQLGPSSDFTSRHVVKDIPVNLLLDGEDWEFEIPVQAGMSSFPSSWSRVRIRHLEMHFVKEASGIGGEIIHQPTTQTGTVYILLQGSTIFHDRRRDQVLPFQAAAPLNYHYAYRLDTGDSTLTNEPSEQFANKFMQMTPFTRWRLRLSASAKENAGLAFPTATALDSTTQIVITFHVTAIRQIDWRHDEE

SEQ ID NO: 402 - protein, 867 aa, synthetic construct
  REGION 1..867: note = Synthetic
MALVDYGKLFEDLNQISMGVLDRVEFSEVMVIHRMYVRLADLNVGQLEGAEKVKHLYVFADVIELPVVEWRWPPQIPGSVTVIILCRLLQWPTDGRQSDTELHLTFMKLHAIQREENRWEITAADGMNWGVYIHAEEVQVGVLTMSWSSVLRVSALRSVITSGFRAVSVFEVPGSVRSTLGATLRPDHALYSTTMQATPNASHISAFNLRIVSPSAYRVCPLQNDTDTYLGIPADVAAVLPVDVVTDPNILLGMQTTVHIAELVKACHPSPDVVSAVGEHLNWLNKLLLPLKESTQLQGSESYKECLALLGRVHAAMKMVRIGLVVPQLQYRMYGSLINQMAQVAQNYDREFKQFKLFIIQNQILGSYLLQQNRAFAERELQMESFHAAVISQRREELDNTFAKMDRLSGQMEAESSAMEQAKKEMDEGLRQFQNRQVANALFAVLSAVAQIGLAFLTAGATAPGAVASAGQAVSIAGQAAQGLRRVVEILEQLEAVMEVVAAVKDLVDSLEQVGQIVDAPVMPELPSEADWSIFVNEVEAVAEGMPTEVSEVPVWRARCKNVAALGREMSITAVQMSELQYDIWVQGMMRDMARSQADRLAAIQPADLTNYLEMATQMDMRTTRMLLGLLNILRIQNAALRYEYLLMPTELTTWPLGMDTVGDLLIAQENAALIGLMQLGPSSDFTSRHVVKDIPVNLLLDGEDWEFEIPVQAGMSSFPSSWSRVRIRHLEMHFVKEASGIGGEIIHQPTTQTGTVYILLQGSTIFHDRRRDQVLPFQAAAPLNYHYAYRLDTGDSTLTNEPSEQFANKFMQMTPFTRWRLRLSASAKENAGLAFPTATALDSTTQIVITFHVTAIRQIDWRHDEE

SEQ ID NO: 403 - protein, 867 aa, synthetic construct
  REGION 1..867: note = Synthetic
MALVDYGKLFEDLNQISMGVLDRVEFSEVMVIHRMYVRLADLNVGQLEGAEKVKQLYIFCDVLELPVVEWRWPPQIPGSVTVIILCRLLQWPTDGRQSDTELHLTFMKLHAIQREENRWEITAADGMNWGVYIHAEEVQVGVLTMSWSSVLRVSALRSVITSGFRAVSVFEVPGSVRSTLGATLRPDHALYSTTMQATPNASHISAFNLRIVSPSAYRVCPLQNDTDTYLGIPADVAAVLPVDVVTDPNILLGMQTTVHIAELVKACHPSPDVVSAVGEHLNWLNKLLLPLKESTQLQGSESYKECLALLGRVHAAMKMVRIGLVVPQLQYRMYGSLINQMAQVAQNYDREFKQFKLFIIQNQILGSYLLQQNRAFAERELQMESFHAAVISQRREELDNTFAKMDRLSGQMEAESSAMEQAKKEMDEGLRQFQNRQVANALFAVLSAVAQIGLAFLTAGATAPGAVASAGQAVSIAGQAAQGLRRVVEILEQLEAVMEVVAAVKDLVDSLEQVGQIVDAPVMPELPSEADWSIFVNEVEAVAEGMPTEVSEVPVWQARCKNVAALGREMSITAVQMSELQYDIWVQGMMRDMARSQADRLAAIQPADLTNYLEMATQMDMRTTRMLLGLLNILRIQNAALRYEYLLMPTELTTWPLGMDTVGDLLIAQENAALIGLMQLGPSSDFTSRHVVKDIPVNLLLDGEDWEFEIPVQAGMSSFPSSWSRVRIRHLEMHFVKEASGIGGEIIHQPTTQTGTVYILLQGSTIFHDRRRDQVLPFQAAAPLNYHYAYRLDTGDSTLTNEPSEQFANKFMQMTPFTRWRLRLSASAKENAGLAFPTATALDSTTQIVITFHVTAIRQIDWRHDEE

SEQ ID NO: 404 - protein, 867 aa, synthetic construct
  REGION 1..867: note = Synthetic
MALVDYGKLFEDLNQISMGVLDRVEFSEVMVIHRMYVRLADLNVGQLEGAEKVKRFYIFADIVELPVVEWRWPPQIPGSVTVIILCRLLQWPTDGRQSDTELHLTFMKLHAIQREENRWEITAADGMNWGVYIHAEEVQVGVLTMSWSSVLRVSALRSVITSGFRAVSVFEVPGSVRSTLGATLRPDHALYSTTMQATPNASHISAFNLRIVSPSAYRVCPLQNDTDTYLGIPADVAAVLPVDVVTDPNILLGMQTTVHIAELVKACHPSPDVVSAVGEHLNWLNKLLLPLKESTQLQGSESYKECLALLGRVHAAMKMVRIGLVVPQLQYRMYGSLINQMAQVAQNYDREFKQFKLFIIQNQILGSYLLQQNRAFAERELQMESFHAAVISQRREELDNTFAKMDRLSGQMEAESSAMEQAKKEMDEGLRQFQNRQVANALFAVLSAVAQIGLAFLTAGATAPGAVASAGQAVSIAGQAAQGLRRVVEILEQLEAVMEVVAAVKDLVDSLEQVGQIVDAPVMPELPSEADWSIFVNEVEAVAEGMPTEVSEVPVWIGKCKNVAALGREMSITAVQMSELQYDIWVQGMMRDMARSQADRLAAIQPADLTNYLEMATQMDMRTTRMLLGLLNILRIQNAALRYEYLLMPTELTTWPLGMDTVGDLLIAQENAALIGLMQLGPSSDFTSRHVVKDIPVNLLLDGEDWEFEIPVQAGMSSFPSSWSRVRIRHLEMHFVKEASGIGGEIIHQPTTQTGTVYILLQGSTIFHDRRRDQVLPFQAAAPLNYHYAYRLDTGDSTLTNEPSEQFANKFMQMTPFTRWRLRLSASAKENAGLAFPTATALDSTTQIVITFHVTAIRQIDWRHDEE

SEQ ID NO: 405 - protein, 867 aa, synthetic construct
  REGION 1..867: note = Synthetic
MALVDYGKLFEDLNQISMGVLDRVEFSEVMVIHRMYVRLADLNVGQLEGAEKVKRFYIFADIVELPVVEWRWPPQIPGSVTVIILCRLLQWPTDGRQSDTELHLTFMKLHAIQREENRWEITAADGMNWGVYIHAEEVQVGVLTMSWSSVLRVSALRSVITSGFRAVSVFEVPGSVRSTLGATLRPDHALYSTTMQATPNASHISAFNLRIVSPSAYRVCPLQNDTDTYLGIPADVAAVLPVDVVTDPNILLGMQTTVHIAELVKACHPSPDVVSAVGEHLNWLNKLLLPLKESTQLQGSESYKECLALLGRVHAAMKMVRIGLVVPQLQYRMYGSLINQMAQVAQNYDREFKQFKLFIIQNQILGSYLLQQNRAFAERELQMESFHAAVISQRREELDNTFAKMDRLSGQMEAESSAMEQAKKEMDEGLRQFQNRQVANALFAVLSAVAQIGLAFLTAGATAPGAVASAGQAVSIAGQAAQGLRRVVEILEQLEAVMEVVAAVKDLVDSLEQVGQIVDAPVMPELPSEADWSIFVNEVEAVAEGMPTEVSEVPVWTVKCKNVAALGREMSITAVQMSELQYDIWVQGMMRDMARSQADRLAAIQPADLTNYLEMATQMDMRTTRMLLGLLNILRIQNAALRYEYLLMPTELTTWPLGMDTVGDLLIAQENAALIGLMQLGPSSDFTSRHVVKDIPVNLLLDGEDWEFEIPVQAGMSSFPSSWSRVRIRHLEMHFVKEASGIGGEIIHQPTTQTGTVYILLQGSTIFHDRRRDQVLPFQAAAPLNYHYAYRLDTGDSTLTNEPSEQFANKFMQMTPFTRWRLRLSASAKENAGLAFPTATALDSTTQIVITFHVTAIRQIDWRHDEE

SEQ ID NO: 406 - protein, 867 aa, synthetic construct
  REGION 1..867: note = Synthetic
MALVDYGKLFEDLNQISMGVLDRVEFSEVMVIHRMYVRLADLNVGQLEGAEKVKRLYIFADIIELPVVEWRWPPQIPGSVTVIILCRLLQWPTDGRQSDTELHLTFMKLHAIQREENRWEITAADGMNWGVYIHAEEVQVGVLTMSWSSVLRVSALRSVITSGFRAVSVFEVPGSVRSTLGATLRPDHALYSTTMQATPNASHISAFNLRIVSPSAYRVCPLQNDTDTYLGIPADVAAVLPVDVVTDPNILLGMQTTVHIAELVKACHPSPDVVSAVGEHLNWLNKLLLPLKESTQLQGSESYKECLALLGRVHAAMKMVRIGLVVPQLQYRMYGSLINQMAQVAQNYDREFKQFKLFIIQNQILGSYLLQQNRAFAERELQMESFHAAVISQRREELDNTFAKMDRLSGQMEAESSAMEQAKKEMDEGLRQFQNRQVANALFAVLSAVAQIGLAFLTAGATAPGAVASAGQAVSIAGQAAQGLRRVVEILEQLEAVMEVVAAVKDLVDSLEQVGQIVDAPVMPELPSEADWSIFVNEVEAVAEGMPTEVSEVPVWMVKCKNVAALGREMSITAVQMSELQYDIWVQGMMRDMARSQADRLAAIQPADLTNYLEMATQMDMRTTRMLLGLLNILRIQNAALRYEYLLMPTELTTWPLGMDTVGDLLIAQENAALIGLMQLGPSSDFTSRHVVKDIPVNLLLDGEDWEFEIPVQAGMSSFPSSWSRVRIRHLEMHFVKEASGIGGEIIHQPTTQTGTVYILLQGSTIFHDRRRDQVLPFQAAAPLNYHYAYRLDTGDSTLTNEPSEQFANKFMQMTPFTRWRLRLSASAKENAGLAFPTATALDSTTQIVITFHVTAIRQIDWRHDEE

SEQ ID NO: 407 - protein, 867 aa, synthetic construct
  REGION 1..867: note = Synthetic
MALVDYGKLFEDLNQISMGVLDRVEFSEVMVIHRMYVRLADLNVGQLEGAEKVKRLYIFADIIELPVVEWRWPPQIPGSVTVIILCRLLQWPTDGRQSDTELHLTFMKLHAIQREENRWEITAADGMNWGVYIHAEEVQVGVLTMSWSSVLRVSALRSVITSGFRAVSVFEVPGSVRSTLGATLRPDHALYSTTMQATPNASHISAFNLRIVSPSAYRVCPLQNDTDTYLGIPADVAAVLPVDVVTDPNILLGMQTTVHIAELVKACHPSPDVVSAVGEHLNWLNKLLLPLKESTQLQGSESYKECLALLGRVHAAMKMVRIGLVVPQLQYRMYGSLINQMAQVAQNYDREFKQFKLFIIQNQILGSYLLQQNRAFAERELQMESFHAAVISQRREELDNTFAKMDRLSGQMEAESSAMEQAKKEMDEGLRQFQNRQVANALFAVLSAVAQIGLAFLTAGATAPGAVASAGQAVSIAGQAAQGLRRVVEILEQLEAVMEVVAAVKDLVDSLEQVGQIVDAPVMPELPSEADWSIFVNEVEAVAEGMPTEVSEVPVWQARCKNVAALGREMSITAVQMSELQYDIWVQGMMRDMARSQADRLAAIQPADLTNYLEMATQMDMRTTRMLLGLLNILRIQNAALRYEYLLMPTELTTWPLGMDTVGDLLIAQENAALIGLMQLGPSSDFTSRHVVKDIPVNLLLDGEDWEFEIPVQAGMSSFPSSWSRVRIRHLEMHFVKEASGIGGEIIHQPTTQTGTVYILLQGSTIFHDRRRDQVLPFQAAAPLNYHYAYRLDTGDSTLTNEPSEQFANKFMQMTPFTRWRLRLSASAKENAGLAFPTATALDSTTQIVITFHVTAIRQIDWRHDEE

SEQ ID NO: 408 - protein, 867 aa, synthetic construct
  REGION 1..867: note = Synthetic
MALVDYGKLFEDLNQISMGVLDRVEFSEVMVIHRMYVRLADLNVGQLEGAEEVKRLYIFADIIELPVVEWRWPPQIPGSVTVIILCRLLQWPTDGRQSDTELHLTFMKLHAIQREENRWEITAADGMNWGVYIHAEEVQVGVLTMSWSSVLRVSALRSVITSGFRAVSVFEVPGSVRSTLGATLRPDHALYSTTMQATPNASHISAFNLRIVSPSAYRVCPLQNDTDTYLGIPADVAAVLPVDVVTDPNILLGMQTTVHIAELVKACHPSPDVVSAVGEHLNWLNKLLLPLKESTQLQGSESYKECLALLGRVHAAMKMVRIGLVVPQLQYRMYGSLINQMAQVAQNYDREFKQFKLFIIQNQILGSYLLQQNRAFAERELQMESFHAAVISQRREELDNTFAKMDRLSGQMEAESSAMEQAKKEMDEGLRQFQNRQVANALFAVLSAVAQIGLAFLTAGATAPGAVASAGQAVSIAGQAAQGLRRVVEILEQLEAVMEVVAAVNDLVDSLEQVGQIVDAPVMPELPSEADWSIFVNEVEAVAEGMPTEVSEVPVWRGKCKSVAALGREMSITAVQMSELQYDIWVQGMMRDMARSQADRLAAIQPADLTNYLEMATQMDMRTTRMLLGLLNILRIQNAALRYEYLLMPTELTTWPLGMDTVGDLLIAQENAALIGLMQLGPSSDFTSRHVVKDIPVNLLLDGEDWEFEIPVQAGMSSFPSSWSRVRIRHLEMHFVKEASGIGGEIIHQPTTQTGTVYILLQGSTIFHDRRRDQVLPFQAAAPLNYHYAYRLDTGDSTLTNEPSEQFANKFMQMTPFTRWRLRLSASAKENAGLAFPTATALDSTTQIVITFHVTAIRQIDWRHDEE

SEQ ID NO: 409 - protein, 867 aa, synthetic construct
  REGION 1..867: note = Synthetic
MALVDYGKLFEDLNQISMGVLDRVEFSEVMVIHRMYVRLADLNVGQLEGAEKVKRLYIFADIIELPVVEWRWPPQIPGSVTVIILCRLLQWPTDGRQSDTELHLTFMKLHAIQREENRWEITAADGMNWGVYIHAEEVQVGVLTMSWSSVLRVSALRSVITSGFRAVSVFEVPGSVRSTLGATLRPDHALYSTTMQATPNASHISAFNLRIVSPSAYRVCPLQNDTDTYLGIPADVAAVLPVDVVTDPNILLGMQTTVHIAELVKACHPSPDVVSAVGEHLNWLNKLLLPLKESTQLQGSESYKECLALLGRVHAAMKMVRIGLVVPQLQYRMYGSLINQMAQVAQNYDREFKQFKLFIIQNQILGSYLLQQNRAFAERELQMESFHAAVISQRREELDNTFAKMDRLSGQMEAESSAMEQAKKEMDEGLRQFQNRQVANALFAVLSAVAQIGLAFLTAGATAPGAVASAGQAVSIAGQAAQGLRRVVEILEQLEAVMEVVAAVKDLVDSLEQVGQIVDAPVMPELPSEADWSIFVNEVEAVAEGMPTEVSEVPVWRGRCKTVAALGREMSITAVQMSELQYDIWVQGMMRDMARSQADRLAAIQPADLTNYLEMATQMDMRTTRMLLGLLNILRIQNAALRYEYLLMPTELTTWPLGMDTVGDLLIAQENAALIGLMQLGPSSDFTSRHVVKDIPVNLLLDGEDWEFEIPVQAGMSSFPSSWSRVRIRHLEMHFVKEASGIGGEIIHQPTTQTGTVYILLQGSTIFHDRRRDQVLPFQAAAPLNYHYAYRLDTGDSTLTNEPSEQFANKFMQMTPFTRWRLRLSASAKENAGLAFPTATALDSTTQIVITFHVTAIRQIDWRHDEE

SEQ ID NO: 410 - protein, 867 aa, synthetic construct
  REGION 1..867: note = Synthetic
MALVDYGKLFEDLNQISMGVLDRVEFSEVMVIHRMYVRLADLNVGQLEGAEKVKRLYIFTDVIELPVVEWRWPPQIPGSVTVIILCRLLQWPTDGRQSDTELHLTFMKLHAIQREENRWEITAADGMNWGVYIHAEEVQVGVLTMSWSSVLRVSALRSVITSGFRAVSVFEVPGSVRSTLGATLRPDHALYSTTMQATPNASHISAFNLRIVSPSAYRVCPLQNDTDTYLGIPADVAAVLPVDVVTDPNILLGMQTTVHIAELVKACHPSPDVVSAVGEHLNWLNKLLLPLKESTQLQGSESYKECLALLGRVHAAMKMVRIGLVVPQLQYRMYGSLINQMAQVAQNYDREFKQFKLFIIQNQILGSYLLQQNRAFAERELQMESFHAAVISQRREELDNTFAKMDRLSGQMEAESSAMEQAKKEMDEGLRQFQNRQVANALFAVLSAVAQIGLAFLTAGATAPGAVASAGQAVSIAGQAAQGLRRVVEILEQLEAVMEVVAAVKDLVDSLEQVGQIVDAPVMPELPSEADWSIFVNEVEAVAEGMPTEVSEVPVWIGKCKNVAALGREMSITAVQMSELQYDIWVQGMMRDMARSQADRLAAIQPADLTNYLEMATQMDMRTTRMLLGLLNILRIQNAALRYEYLLMPTELTTWPLGMDTVGDLLIAQENAALIGLMQLGPSSDFTSRHVVKDIPVNLLLDGEDWEFEIPVQAGMSSFPSSWSRVRIRHLEMHFVKEASGIGGEIIHQPTTQTGTVYILLQGSTIFHDRRRDQVLPFQAAAPLNYHYAYRLDTGDSTLTNEPSEQFANKFMQMTPFTRWRLRLSASAKENAGLAFPTATALDSTTQIVITFHVTAIRQIDWRHDEE

SEQ ID NO: 411 - protein, 867 aa, synthetic construct
  REGION 1..867: note = Synthetic
MALVDYGKLFEDLNQISMGVLDRVEFSEVMVIHRMYVRLADLNVGQLEGAEKVKRLYVFCDIIELPVVEWRWPPQIPGSVTVIILCRLLQWPTDGRQSDTELHLTFMKLHAIQREENRWEITAADGMNWGVYIHAEEVQVGVLTMSWSSVLRVSALRSVITSGFRAVSVFEVPGSVRSTLGATLRPDHALYSTTMQATPNASHISAFNLRIVSPSAYRVCPLQNDTDTYLGIPADVAAVLPVDVVTDPNILLGMQTTVHIAELVKACHPSPDVVSAVGEHLNWLNKLLLPLKESTQLQGSESYKECLALLGRVHAAMKMVRIGLVVPQLQYRMYGSLINQMAQVAQNYDREFKQFKLFIIQNQILGSYLLQQNRAFAERELQMESFHAAVISQRREELDNTFAKMDRLSGQMEAESSAMEQAKKEMDEGLRQFQNRQVANALFAVLSAVAQIGLAFLTAGATAPGAVASAGQAVSIAGQAAQGLRRVVEILEQLEAVMEVVAAVKDLVDSLEQVGQIVDAPVMPELPSEADWSIFVNEVEAVAEGMPTEVSEVPVWLARCKNVAALGREMSITAVQMSELQYDIWVQGMMRDMARSQADRLAAIQPADLTNYLEMATQMDMRTTRMLLGLLNILRIQNAALRYEYLLMPTELTTWPLGMDTVGDLLIAQENAALIGLMQLGPSSDFTSRHVVKDIPVNLLLDGEDWEFEIPVQAGMSSFPSSWSRVRIRHLEMHFVKEASGIGGEIIHQPTTQTGTVYILLQGSTIFHDRRRDQVLPFQAAAPLNYHYAYRLDTGDSTLTNEPSEQFANKFMQMTPFTRWRLRLSASAKENAGLAFPTATALDSTTQIVITFHVTAIRQIDWRHDEE

SEQ ID NO: 412 - protein, 867 aa, synthetic construct
  REGION 1..867: note = Synthetic
MALVDYGKLFEDLNQISMGVLDRVEFSEVMVIHRMYVRLADLNVGQLEGAEKVKRLYVFSDIIELPVVEWRWPPQIPGSVTVIILCRLLQWPTDGRQSDTELHLTFMKLHAIQREENRWEITAADGMNWGVYIHAEEVQVGVLTMSWSSVLRVSALRSVITSGFRAVSVFEVPGSVRSTLGATLRPDHALYSTTMQATPNASHISAFNLRIVSPSAYRVCPLQNDTDTYLGIPADVAAVLPVDVVTDPNILLGMQTTVHIAELVKACHPSPDVVSAVGEHLNWLNKLLLPLKESTQLQGSESYKECLALLGRVHAAMKMVRIGLVVPQLQYRMYGSLINQMAQVAQNYDREFKQFKLFIIQNQILGSYLLQQNRAFAERELQMESFHAAVISQRREELDNTFAKMDRLSGQMEAESSAMEQAKKEMDEGLRQFQNRQVANALFAVLSAVAQIGLAFLTAGATAPGAVASAGQAVSIAGQAAQGLRRVVEILEQLEAVMEVVAAVKDLVDSLEQVGQIVDAPVMPELPSEADWSIFVNEVEAVAEGMPTEVSEVPVWIGKCKNVAALGREMSITAVQMSELQYDIWVQGMMRDMARSQADRLAAIQPADLTNYLEMATQMDMRTTRMLLGLLNILRIQNAALRYEYLLMPTELTTWPLGMDTVGDLLIAQENAALIGLMQLGPSSDFTSRHVVKDIPVNLLLDGEDWEFEIPVQAGMSSFPSSWSRVRIRHLEMHFVKEASGIGGEIIHQPTTQTGTVYILLQGSTIFHDRRRDQVLPFQAAAPLNYHYAYRLDTGDSTLTNEPSEQFANKFMQMTPFTRWRLRLSASAKENAGLAFPTATALDSTTQIVITFHVTAIRQIDWRHDEE

SEQ ID NO: 413 - protein, 867 aa, synthetic construct
  REGION 1..867: note = Synthetic
MALVDYGKLFEDLNQISMGVLDRVEFSEVMVIHRMYVRLADLNVGQLEGAEKVKRLYVFSDIIELPVVEWRWPPQIPGSVTVIILCRLLQWPTDGRQSDTELHLTFMKLHAIQREENRWEITAADGMNWGVYIHAEEVQVGVLTMSWSSVLRVSALRSVITSGFRAVSVFEVPGSVRSTLGATLRPDHALYSTTMQATPNASHISAFNLRIVSPSAYRVCPLQNDTDTYLGIPADVAAVLPVDVVTDPNILLGMQTTVHIAELVKACHPSPDVVSAVGEHLNWLNKLLLPLKESTQLQGSESYKECLALLGRVHAAMKMVRIGLVVPQLQYRMYGSLINQMAQVAQNYDREFKQFKLFIIQNQILGSYLLQQNRAFAERELQMESFHAAVISQRREELDNTFAKMDRLSGQMEAESSAMEQAKKEMDEGLRQFQNRQVANALFAVLSAVAQIGLAFLTAGATAPGAVASAGQAVSIAGQAAQGLRRVVEILEQLEAVMEVVAAVKDLVDSLEQVGQIVDAPVMPELPSEADWSIFVNEVEAVAEGMPTEVSEVPVWRGRCKTVAALGREMSITAVQMSELQYDIWVQGMMRDMARSQADRLAAIQPADLTNYLEMATQMDMRTTRMLLGLLNILRIQNAALRYEYLLMPTELTTWPLGMDTVGDLLIAQENAALIGLMQLGPSSDFTSRHVVKDIPVNLLLDGEDWEFEIPVQAGMSSFPSSWSRVRIRHLEMHFVKEASGIGGEIIHQPTTQTGTVYILLQGSTIFHDRRRDQVLPFQAAAPLNYHYAYRLDTGDSTLTNEPSEQFANKFMQMTPFTRWRLRLSASAKENAGLAFPTATALDSTTQIVITFHVTAIRQIDWRHDEE

SEQ ID NO: 414 - protein, 867 aa, synthetic construct
  REGION 1..867: note = Synthetic
MALVDYGKLFEDLNQISMGVLDRVEFSEVMVIHRMYVRLADLNVGQLEGAEKVKRLYVFSDVIELPVVEWRWPPQIPGSVTVIILCRLLQWPTDGRQSDTELHLTFMKLHAIQREENRWEITAADGMNWGVYIHAEEVQVGVLTMSWSSVLRVSALRSVITSGFRAVSVFEVPGSVRSTLGATLRPDHALYSTTMQATPNASHISAFNLRIVSPSAYRVCPLQNDTDTYLGIPADVAAVLPVDVVTDPNILLGMQTTVHIAELVKACHPSPDVVSAVGEHLNWLNKLLLPLKESTQLQGSESYKECLALLGRVHAAMKMVRIGLVVPQLQYRMYGSLINQMAQVAQNYDREFKQFKLFIIQNQILGSYLLQQNRAFAERELQMESFHAAVISQRREELDNTFAKMDRLSGQMEAESSAMEQAKKEMDEGLRQFQNRQVANALFAVLSAVAQIGLAFLTAGATAPGAVASAGQAVSIAGQAAQGLRRVVEILEQLEAVMEVVAAVKDLVDSLEQVGQIVDAPVMPELPSEADWSIFVNEVEAVAEGMPTEVSEVPVWRGKCKSVAALGREMSITAVQMSELQYDIWVQGMMRDMARSQADRLAAIQPADLTNYLEMATQMDMRTTRMLLGLLNILRIQNAALRYEYLLMPTELTTWPLGMDTVGDLLIAQENAALIGLMQLGPSSDFTSRHVVKDIPVNLLLDGEDWEFEIPVQAGMSSFPSSWSRVRIRHLEMHFVKEASGIGGEIIHQPTTQTGTVYILLQGSTIFHDRRRDQVLPFQAAAPLNYHYAYRLDTGDSTLTNEPSEQFANKFMQMTPFTRWRLRLSASAKENAGLAFPTATALDSTTQIVITFHVTAIRQIDWRHDEE

SEQ ID NO: 415 - protein, 867 aa, synthetic construct
  REGION 1..867: note = Synthetic
MALVDYGKLFEDLNQISMGVLDRVEFSEVMVIHRMYVRLADLNVGQLEGAEKVKRLYVFSDVIELPVVEWRWPPQIPGSVTVIILCRLLQWPTDGRQSDTELHLTFMKLHAIQREENRWEITAADGMNWGVYIHAEEVQVGVLTMSWSSVLRVSALRSVITSGFRAVSVFEVPGSVRSTLGATLRPDHALYSTTMQATPNASHISAFNLRIVSPSAYRVCPLQNDTDTYLGIPADVAAVLPVDVVTDPNILLGMQTTVHIAELVKACHPSPDVVSAVGEHLNWLNKLLLPLKESTQLQGSESYKECLALLGRVHAAMKMVRIGLVVPQLQYRMYGSLINQMAQVAQNYDREFKQFKLFIIQNQILGSYLLQQNRAFAERELQMESFHAAVISQRREELDNTFAKMDRLSGQMEAESSAMEQAKKEMDEGLRQFQNRQVANALFAVLSAVAQIGLAFLTAGATAPGAVASAGQAVSIAGQAAQGLRRVVEILEQLEAVMEVVAAVKDLVDSLEQVGQIVDAPVMPELPSEADWSIFVNEVEAVAEGMPTEVSEVPVWRVKCKNVAALGREMSITAVQMSELQYDIWVQGMMRDMARSQADRLAAIQPADLTNYLEMATQMDMRTTRMLLGLLNILRIQNAALRYEYLLMPTELTTWPLGMDTVGDLLIAQENAALIGLMQLGPSSDFTSRHVVKDIPVNLLLDGEDWEFEIPVQAGMSSFPSSWSRVRIRHLEMHFVKEASGIGGEIIHQPTTQTGTVYILLQGSTIFHDRRRDQVLPFQAAAPLNYHYAYRLDTGDSTLTNEPSEQFANKFMQMTPFTRWRLRLSASAKENAGLAFPTATALDSTTQIVITFHVTAIRQIDWRHDEE

SEQ ID NO: 416 - protein, 867 aa, synthetic construct
  REGION 1..867: note = Synthetic
MALVDYGKLFEDLNQISMGVLDRVEFSEVMVIHRMYVRLADLNVGQLEGAEKVMRLYIFADVVELPVVEWRWPPQIPGSVTVIILCRLLQWPTDGRQSDTELHLTFMKLHAIQREENRWEITAADGMNWGVYIHAEEVQVGVLTMSWSSVLRVSALRSVITSGFRAVSVFEVPGSVRSTLGATLRPDHALYSTTMQATPNASHISAFNLRIVSPSAYRVCPLQNDTDTYLGIPADVAAVLPVDVVTDPNILLGMQTTVHIAELVKACHPSPDVVSAVGEHLNWLNKLLLPLKESTQLQGSESYKECLALLGRVHAAMKMVRIGLVVPQLQYRMYGSLINQMAQVAQNYDREFKQFKLFIIQNQILGSYLLQQNRAFAERELQMESFHAAVISQRREELDNTFAKMDRLSGQMEAESSAMEQAKKEMDEGLRQFQNRQVANALFAVLSAVAQIGLAFLTAGATAPGAVASAGQAVSIAGQAAQGLRRVVEILEQLEAVMEVVAAVKDLVDSLEQVGQIVDAPVMPELPSEADWSIFVNEVEAVAEGMPTEVSEVPVWRGKCKSVAALGREMSITAVQMSELQYDIWVQGMMRDMARSQADRLAAIQPADLTNYLEMATQMDMRTTRMLLGLLNILRIQNAALRYEYLLMPTELTTWPLGMDTVGDLLIAQENAALIGLMQLGPSSDFTSRHVVKDIPVNLLLDGEDWEFEIPVQAGMSSFPSSWSRVRIRHLEMHFVKEASGIGGEIIHQPTTQTGTVYILLQGSTIFHDRRRDQVLPFQAAAPLNYHYAYRLDTGDSTLTNEPSEQFANKFMQMTPFTRWRLRLSASAKENAGLAFPTATALDSTTQIVITFHVTAIRQIDWRHDEE

SEQ ID NO: 417 - protein, 867 aa, synthetic construct
  REGION 1..867: note = Synthetic
MALVDYGKLFEDLNQISMGVLDRVEFSEVMVIHRMYVRLADLNVGQLEGAEKVRHLYIFCDVIELPVVEWRWPPQIPGSVTVIILCRLLQWPTDGRQSDTELHLTFMKLHAIQREENRWEITAADGMNWGVYIHAEEVQVGVLTMSWSSVLRVSALRSVITSGFRAVSVFEVPGSVRSTLGATLRPDHALYSTTMQATPNASHISAFNLRIVSPSAYRVCPLQNDTDTYLGIPADVAAVLPVDVVTDPNILLGMQTTVHIAELVKACHPSPDVVSAVGEHLNWLNKLLLPLKESTQLQGSESYKECLALLGRVHAAMKMVRIGLVVPQLQYRMYGSLINQMAQVAQNYDREFKQFKLFIIQNQILGSYLLQQNRAFAERELQMESFHAAVISQRREELDNTFAKMDRLSGQMEAESSAMEQAKKEMDEGLRQFQNRQVANALFAVLSAVAQIGLAFLTAGATAPGAVASAGQAVSIAGQAAQGLRRVVEILEQLEAVMEVVAAVKDLVDSLEQVGQIVDAPVMPELPSEADWSIFVNEVEAVAEGMPTEVSEVPVWIGKCKNVAALGREMSITAVQMSELQYDIWVQGMMRDMARSQADRLAAIQPADLTNYLEMATQMDMRTTRMLLGLLNILRIQNAALRYEYLLMPTELTTWPLGMDTVGDLLIAQENAALIGLMQLGPSSDFTSRHVVKDIPVNLLLDGEDWEFEIPVQAGMSSFPSSWSRVRIRHLEMHFVKEASGIGGEIIHQPTTQTGTVYILLQGSTIFHDRRRDQVLPFQAAAPLNYHYAYRLDTGDSTLTNEPSEQFANKFMQMTPFTRWRLRLSASAKENAGLAFPTATALDSTTQIVITFHVTAIRQIDWRHDEE

SEQ ID NO: 418 - protein, 867 aa, synthetic construct
  REGION 1..867: note = Synthetic
MALVDYGKLFEDLNQISMGVLDRVEFSEVMVIHRMYVRLADLNVGQLEGAEKVRHLYIFSDVVELPVVEWRWPPQIPGSVTVIILCRLLQWPTDGRQSDTELHLTFMKLHAIQREENRWEITAADGMNWGVYIHAEEVQVGVLTMSWSSVLRVSALRSVITSGFRAVSVFEVPGSVRSTLGATLRPDHALYSTTMQATPNASHISAFNLRIVSPSAYRVCPLQNDTDTYLGIPADVAAVLPVDVVTDPNILLGMQTTVHIAELVKACHPSPDVVSAVGEHLNWLNKLLLPLKESTQLQGSESYKECLALLGRVHAAMKMVRIGLVVPQLQYRMYGSLINQMAQVAQNYDREFKQFKLFIIQNQILGSYLLQQNRAFAERELQMESFHAAVISQRREELDNTFAKMDRLSGQMEAESSAMEQAKKEMDEGLRQFQNRQVANALFAVLSAVAQIGLAFLTAGATAPGAVASAGQAVSIAGQAAQGLRRVVEILEQLEAVMEVVAAVKDLVDSLEQVGQIVDAPVMPELPSEADWSIFVNEVEAVAEGMPTEVSEVPVWMVKCKNVAALGREMSITAVQMSELQYDIWVQGMMRDMARSQADRLAAIQPADLTNYLEMATQMDMRTTRMLLGLLNILRIQNAALRYEYLLMPTELTTWPLGMDTVGDLLIAQENAALIGLMQLGPSSDFTSRHVVKDIPVNLLLDGEDWEFEIPVQAGMSSFPSSWSRVRIRHLEMHFVKEASGIGGEIIHQPTTQTGTVYILLQGSTIFHDRRRDQVLPFQAAAPLNYHYAYRLDTGDSTLTNEPSEQFANKFMQMTPFTRWRLRLSASAKENAGLAFPTATALDSTTQIVITFHVTAIRQIDWRHDEE

SEQ ID NO: 419 - protein, 867 aa, synthetic construct
  REGION 1..867: note = Synthetic
MALVDYGKLFEDLNQISMGVLDRVEFSEVMVIHRMYVRLADLNVGQLEGAEKVRHLYIFSDVVELPVVEWRWPPQIPGSVTVIILCRLLQWPTDGRQSDTELHLTFMKLHAIQREENRWEITAADGMNWGVYIHAEEVQVGVLTMSWSSVLRVSALRSVITSGFRAVSVFEVPGSVRSTLGATLRPDHALYSTTMQATPNASHISAFNLRIVSPSAYRVCPLQNDTDTYLGIPADVAAVLPVDVVTDPNILLGMQTTVHIAELVKACHPSPDVVSAVGEHLNWLNKLLLPLKESTQLQGSESYKECLALLGRVHAAMKMVRIGLVVPQLQYRMYGSLINQMAQVAQNYDREFKQFKLFIIQNQILGSYLLQQNRAFAERELQMESFHAAVISQRREELDNTFAKMDRLSGQMEAESSAMEQAKKEMDEGLRQFQNRQVANALFAVLSAVAQIGLAFLTAGATAPGAVASAGQAVSIAGQAAQGLRRVVEILEQLEAVMEVVAAVNDLVDSLEQVGQIVDAPVMPELPSEADWSIFVNEVEAVAEGMPTEVSEVPVWRGKCKSVAALGREMSITAVQMSELQYDIWVQGMMRDMARSQADRLAAIQPADLTNYLEMATQMDMRTTRMLLGLLNILRIQNAALRYEYLLMPTELTTWPLGMDTVGDLLIAQENAALIGLMQLGPSSDFTSRHVVKDIPVNLLLDGEDWEFEIPVQAGMSSFPSSWSRVRIRHLEMHFVKEASGIGGEIIHQPTTQTGTVYILLQGSTIFHDRRRDQVLPFQAAAPLNYHYAYRLDTGDSTLTNEPSEQFANKFMQMTPFTRWRLRLSASAKENAGLAFPTATALDSTTQIVITFHVTAIRQIDWRHDEE

SEQ ID NO: 420 - protein, 867 aa, synthetic construct
  REGION 1..867: note = Synthetic
MALVDYGKLFEDLNQISMGVLDRVEFSEVMVIHRMYVRLADLNVGQLEGAEKVRQLYVFCDVLVLPVVEWRWPPQIPGSVTVIILCRLLQWPTDGRQSDTELHLTFMKLHAIQREENRWEITAADGMNWGVYIHAEEVQVGVLTMSWSSVLRVSALRSVITSGFRAVSVFEVPGSVRSTLGATLRPDHALYSTTMQATPNASHISAFNLRIVSPSAYRVCPLQNDTDTYLGIPADVAAVLPVDVVTDPNILLGMQTTVHIAELVKACHPSPDVVSAVGEHLNWLNKLLLPLKESTQLQGSESYKECLALLGRVHAAMKMVRIGLVVPQLQYRMYGSLINQMAQVAQNYDREFKQFKLFIIQNQILGSYLLQQNRAFAERELQMESFHAAVISQRREELDNTFAKMDRLSGQMEAESSAMEQAKKEMDEGLRQFQNRQVANALFAVLSAVAQIGLAFLTAGATAPGAVASAGQAVSIAGQAAQGLRRVVEILEQLEAVMEVVAAVKDLVDSLEQVGQIVDAPVMPELPSEADWSIFVNEVEAVAEGMPTEVSEVPVWHGKCKNVAALGREMSITAVQMSELQYDIWVQGMMRDMARSQADRLAAIQPADLTNYLEMATQMDMRTTRMLLGLLNILRIQNAALRYEYLLMPTELTTWPLGMDTVGDLLIAQENAALIGLMQLGPSSDFTSRHVVKDIPVNLLLDGEDWEFEIPVQAGMSSFPSSWSRVRIRHLEMHFVKEASGIGGEIIHQPTTQTGTVYILLQGSTIFHDRRRDQVLPFQAAAPLNYHYAYRLDTGDSTLTNEPSEQFANKFMQMTPFTRWRLRLSASAKENAGLAFPTATALDSTTQIVITFHVTAIRQIDWRHDEE

SEQ ID NO: 421 - protein, 867 aa, synthetic construct
  REGION 1..867: note = Synthetic
MALVDYGKLFEDLNQISMGVLDRVEFSEVMVIHRMYVRLADLNVGQLEGAEKVRQLYVFCDVLVLPVVEWRWPPQIPGSVTVIILCRLLQWPTDGRQSDTELHLTFMKLHAIQREENRWEITAADGMNWGVYIHAEEVQVGVLTMSWSSVLRVSALRSVITSGFRAVSVFEVPGSVRSTLGATLRPDHALYSTTMQATPNASHISAFNLRIVSPSAYRVCPLQNDTDTYLGIPADVAAVLPVDVVTDPNILLGMQTTVHIAELVKACHPSPDVVSAVGEHLNWLNKLLLPLKESTQLQGSESYKECLALLGRVHAAMKMVRIGLVVPQLQYRMYGSLINQMAQVAQNYDREFKQFKLFIIQNQILGSYLLQQNRAFAERELQMESFHAAVISQRREELDNTFAKMDRLSGQMEAESSAMEQAKKEMDEGLRQFQNRQVANALFAVLSAVAQIGLAFLTAGATAPGAVASAGQAVSIAGQAAQGLRRVVEILEQLEAVMEVVAAVKDLVDSLEQVGQIVDAPVMPELPSEADWSIFVNEVEAVAEGMPTEVSEVPVWLGRCKNVAALGREMSITAVQMSELQYDIWVQGMMRDMARSQADRLAAIQPADLTNYLEMATQMDMRTTRMLLGLLNILRIQNAALRYEYLLMPTELTTWPLGMDTVGDLLIAQENAALIGLMQLGPSSDFTSRHVVKDIPVNLLLDGEDWEFEIPVQAGMSSFPSSWSRVRIRHLEMHFVKEASGIGGEIIHQPTTQTGTVYILLQGSTIFHDRRRDQVLPFQAAAPLNYHYAYRLDTGDSTLTNEPSEQFANKFMQMTPFTRWRLRLSASAKENAGLAFPTATALDSTTQIVITFHVTAIRQIDWRHDEE

SEQ ID NO: 422 - protein, 867 aa, synthetic construct
  REGION 1..867: note = Synthetic
IALVDYGKLFEDLNQISMGVLDRVEFSEVMVIHRMYVRLADLNVGQLEGAEKVRQLYVFCDVLVLPVVEWRWPPQIPGSVTVIILCRLLQWPTDGRQSDTELHLTFMKLHAIQREENRWEITAADGMNWGVYIHAEEVQVGVLTMSWSSVLRVSALRSVITSGFRAVSVFEVPGSVRSTLGATLRPDHALYSTTMQATPNASHISAFNLRIVSPSAYRVCPLQNDTDTYLGIPADVAAVLPVDVVTDPNILLGMQTTVHIAELVKACHPSPDVVSAVGEHLNWLNKLLLPLKESTQLQGSESYKECLALLGRVHAAMKMVRIGLVVPQLQYRMYGSLINQMAQVAQNYDREFKQFKLFIIQNQILGSYLLQQNRAFAERELQMESFHAAVISQRREELDNTFAKMDRLSGQMEAESSAMEQAKKEMDEGLRQFQNRQVANALFAVLSAVAQIGLAFLTAGATAPGAVASAGQAVSIAGQAAQGLRRVVEILEQLEAVMEVVAAVKDLVDSLEQVGQIVDAPVMPELPSEADWSIFVNEVEAVAEGMPTEVSEVPVWRGKCKSVAALGREMSITAVQMSELQYDIWVQGMMRDMARSQADRLAAIQPADLTNYLEMATQMDMRTTRMLLGLLNILRIQNAALRYEYLLMPTELTTWPLGMDTVGDLLIAQENAALIGLMQLGPSSDFTSRHVVKDIPVNLLLDGEDWEFEIPVQAGMSSFPSSWSRVRIRHLEMHFVKEASGIGGEIIHQPTTQTGTVYILLQGSTIFHDRRRDQVLPFQAAAPLNYHYAYRLDTGDSTLTNEPSEQFANKFMQMTPFTRWRLRLSASAKENAGLAFPTATALDSTTQIVITFHVTAIRQIDWRHDEE

SEQ ID NO: 423 - protein, 867 aa, synthetic construct
  REGION 1..867: note = Synthetic
MALVDYGKLFEDLNQISMGVLDRVEFSEVMVIHRMYVRLADLNVGQLEGAEKVRRLYIFADILELPVVEWRWPPQIPGSVTVIILCRLLQWPTDGRQSDTELHLTFMKLHAIQREENRWEITAADGMNWGVYIHAEEVQVGVLTMSWSSVLRVSALRSVITSGFRAVSVFEVPGSVRSTLGATLRPDHALYSTTMQATPNASHISAFNLRIVSPSAYRVCPLQNDTDTYLGIPADVAAVLPVDVVTDPNILLGMQTTVHIAELVKACHPSPDVVSAVGEHLNWLNKLLLPLKESTQLQGSESYKECLALLGRVHAAMKMVRIGLVVPQLQYRMYGSLINQMAQVAQNYDREFKQFKLFIIQNQILGSYLLQQNRAFAERELQMESFHAAVISQRREELDNTFAKMDRLSGQMEAESSAMEQAKKEMDEGLRQFQNRQVANALFAVLSAVAQIGLAFLTAGATAPGAVASAGQAVSIAGQAAQGLRRVVEILEQLEAVMEVVAAVKDLVDSLEQVGQIVDAPVMPELPSEADWSIFVNEVEAVAEGMPTEVSEVPVWMVKCKNVAALGREMSITAVQMSELQYDIWVQGMMRDMARSQADRLAAIQPADLTNYLEMATQMDMRTTRMLLGLLNILRIQNAALRYEYLLMPTELTTWPLGMDTVGDLLIAQENAALIGLMQLGPSSDFTSRHVVKDIPVNLLLDGEDWEFEIPVQAGMSSFPSSWSRVRIRHLEMHFVKEASGIGGEIIHQPTTQTGTVYILLQGSTIFHDRRRDQVLPFQAAAPLNYHYAYRLDTGDSTLTNEPSEQFANKFMQMTPFTRWRLRLSASAKENAGLAFPTATALDSTTQIVITFHVTAIRQIDWRHDEE

SEQ ID NO: 424 - protein, 867 aa, synthetic construct
  REGION 1..867: note = Synthetic
MALVDYGKLFEDLNQISMGVLDRVEFSEVMVIHRMYVRLADLNVGQLEGAEKVRRLYVFCDVVVLPVVEWRWPPQIPGSVTVIILCRLLQWPTDGRQSDTELHLTFMKLHAIQREENRWEITAADGMNWGVYIHAEEVQVGVLTMSWSSVLRVSALRSVITSGFRAVSVFEVPGSVRSTLGATLRPDHALYSTTMQATPNASHISAFNLRIVSPSAYRVCPLQNDTDTYLGIPADVAAVLPVDVVTDPNILLGMQTTVHIAELVKACHPSPDVVSAVGEHLNWLNKLLLPLKESTQLQGSESYKECLALLGRVHAAMKMVRIGLVVPQLQYRMYGSLINQMAQVAQNYDREFKQFKLFIIQNQILGSYLLQQNRAFAERELQMESFHAAVISQRREELDNTFAKMDRLSGQMEAESSAMEQAKKEMDEGLRQFQNRQVANALFAVLSAVAQIGLAFLTAGATAPGAVASAGQAVSIAGQAAQGLRRVVEILEQLEAVMEVVAAVKDLVDSLEQVGQIVDAPVMPELPSEADWSIFVNEVEAVAEGMPTEVSEVPVWRARCKNVAALGREMSITAVQMSELQYDIWVQGMMRDMARSQADRLAAIQPADLTNYLEMATQMDMRTTRMLLGLLNILRIQNAALRYEYLLMPTELTTWPLGMDTVGDLLIAQENAALIGLMQLGPSSDFTSRHVVKDIPVNLLLDGEDWEFEIPVQAGMSSFPSSWSRVRIRHLEMHFVKEASGIGGEIIHQPTTQTGTVYILLQGSTIFHDRRRDQVLPFQAAAPLNYHYAYRLDTGDSTLTNEPSEQFANKFMQMTPFTRWRLRLSASAKENAGLAFPTATALDSTTQIVITFHVTAIRQIDWRHDEE

SEQ ID NO: 425 - protein, 867 aa, synthetic construct
  REGION 1..867: note = Synthetic
MALVDYGKLFEDLNQISMGVLDRVEFSEVMVIHRMYVRLADLNVGQLEGAEKVRRLYVFTDVLVLPVVEWRWPPQIPGSVTVIILCRLLQWPTDGRQSDTELHLTFMKLHAIQREENRWEITAADGMNWGVYIHAEEVQVGVLTMSWSSVLRVSALRSVITSGFRAVSVFEVPGSVRSTLGATLRPDHALYSTTMQATPNASHISAFNLRIVSPSAYRVCPLQNDTDTYLGIPADVAAVLPVDVVTDPNILLGMQTTVHIAELVKACHPSPDVVSAVGEHLNWLNKLLLPLKESTQLQGSESYKECLALLGRVHAAMKMVRIGLVVPQLQYRMYGSLINQMAQVAQNYDREFKQFKLFIIQNQILGSYLLQQNRAFAERELQMESFHAAVISQRREELDNTFAKMDRLSGQMEAESSAMEQAKKEMDEGLRQFQNRQVANALFAVLSAVAQIGLAFLTAGATAPGAVASAGQAVSIAGQAAQGLRRVVEILEQLEAVMEVVAAVKDLVDSLEQVGQIVDAPVMPELPSEADWSIFVNEVEAVAEGMPTEVSEVPVWIGKCKNVAALGREMSITAVQMSELQYDIWVQGMMRDMARSQADRLAAIQPADLTNYLEMATQMDMRTTRMLLGLLNILRIQNAALRYEYLLMPTELTTWPLGMDTVGDLLIAQENAALIGLMQLGPSSDFTSRHVVKDIPVNLLLDGEDWEFEIPVQAGMSSFPSSWSRVRIRHLEMHFVKEASGIGGEIIHQPTTQTGTVYILLQGSTIFHDRRRDQVLPFQAAAPLNYHYAYRLDTGDSTLTNEPSEQFANKFMQMTPFTRWRLRLSASAKENAGLAFPTATALDSTTQIVITFHVTAIRQIDWRHDEE

SEQ ID NO: 426 - protein, 867 aa, synthetic construct
  REGION 1..867: note = Synthetic
MALVDYGKLFEDLNQISMGVLDRVEFSEVMVIHRMYVRLADLNVGQLEGAEKVRRLYVFTDVLVLPVVEWRWPPQIPGSVTVIILCRLLQWPTDGRQSDTELHLTFMKLHAIQREENRWEITAADGMNWGVYIHAEEVQVGVLTMSWSSVLRVSALRSVITSGFRAVSVFEVPGSVRSTLGATLRPDHALYSTTMQATPNASHISAFNLRIVSPSAYRVCPLQNDTDTYLGIPADVAAVLPVDVVTDPNILLGMQTTVHIAELVKACHPSPDVVSAVGEHLNWLNKLLLPLKESTQLQGSESYKECLALLGRVHAAMKMVRIGLVVPQLQYRMYGSLINQMAQVAQNYDREFKQFKLFIIQNQILGSYLLQQNRAFAERELQMESFHAAVISQRREELDNTFAKMDRLSGQMEAESSAMEQAKKEMDEGLRQFQNRQVANALFAVLSAVAQIGLAFLTAGATAPGAVASAGQAVSIAGQAAQGLRRVVEILEQLEAVMEVVAAVKDLVDSLEQVGQIVDAPVMPELPSEADWSIFVNEVEAVAEGMPTEVSEVPVWRARCKNVAALGREMSITAVQMSELQYDIWVQGMMRDMARSQADRLAAIQPADLTNYLEMATQMDMRTTRMLLGLLNILRIQNAALRYEYLLMPTELTTWPLGMDTVGDLLIAQENAALIGLMQLGPSSDFTSRHVVKDIPVNLLLDGEDWEFEIPVQAGMSSFPSSWSRVRIRHLEMHFVKEASGIGGEIIHQPTTQTGTVYILLQGSTIFHDRRRDQVLPFQAAAPLNYHYAYRLDTGDSTLTNEPSEQFANKFMQMTPFTRWRLRLSASAKENAGLAFPTATALDSTTQIVITFHVTAIRQIDWRHDEE

SEQ ID NO: 427 - protein, 867 aa, synthetic construct
  REGION 1..867: note = Synthetic
MALVDYGKLFEDLNQISMGVLDRVEFSEVMVIHRMYVRLADLNVGQLEGAEKVRRLYVFTDVLVLPVVEWRWPPQIPGSVTVIILCRLLQWPTDGRQSDTELHLTFMKLHAIQREENRWEITAADGMNWGVYIHAEEVQVGVLTMSWSSVLRVSALRSVITSGFRAVSVFEVPGSVRSTLGATLRPDHALYSTTMQATPNASHISAFNLRIVSPSAYRVCPLQNDTDTYLGIPADVAAVLPVDVVTDPNILLGMQTTVHIAELVKACHPSPDVVSAVGEHLNWLNKLLLPLKESTQLQGSESYKECLALLGRVHAAMKMVRIGLVVPQLQYRMYGSLINQMAQVAQNYDREFKQFKLFIIQNQILGSYLLQQNRAFAERELQMESFHAAVISQRREELDNTFAKMDRLSGQMEAESSAMEQAKKEMDEGLRQFQNRQVANALFAVLSAVAQIGLAFLTAGATAPGAVASAGQAVSIAGQAAQGLRRVVEILEQLEAVMEVVAAVKDLVDSLEQVGQIVDAPVMPELPSEADWSIFVNEVEAVAEGMPTEVSEVPVWTVKCKNVAALGREMSITAVQMSELQYDIWVQGMMRDMARSQADRLAAIQPADLTNYLEMATQMDMRTTRMLLGLLNILRIQNAALRYEYLLMPTELTTWPLGMDTVGDLLIAQENAALIGLMQLGPSSDFTSRHVVKDIPVNLLLDGEDWEFEIPVQAGMSSFPSSWSRVRIRHLEMHFVKEASGIGGEIIHQPTTQTGTVYILLQGSTIFHDRRRDQVLPFQAAAPLNYHYAYRLDTGDSTLTNEPSEQFANKFMQMTPFTRWRLRLSASAKENAGLAFPTATALDSTTQIVITFHVTAIRQIDWRHDEE

SEQ ID NO: 428 - DNA, 2556 bp, synthetic construct
  misc_feature 1..2556: note = Synthetic
  source 1..2556: mol_type = other DNA
atggattacagcacgctttacagggatctgaaccagataagcatgcccctggatcgggtagagttctcagaggtgatggtaatccacaggatgtacttgaggttatctgatctgaatgtgggggagctccccggagccgagagggtgaagcggttgtatgtgttggcagacgtggtggagctcgcaacatttgcgcatccacagttgcttaatacgcggatgccaggatcggtgacggtgatcattctgtgtcgtcttcttcagtttccaactgatgggtcgttcgctgcttggctcgagctgccgttcatggagttgcacacactcatagaacaatacaggtcagagataaaagcagcagatgacgcgaaatggggaacgtatgtacacgcagaggaagtacagctcagcccgctgtttaatgggtggccttatctggttgttgaggcacagcgctgtattataaccgcggccatgcacaatacatttaaccgccctgggtgggttcgctccattactcaatttacaactgatcagtccggtcgggtagataccacactgctcgcacgaacagaattcggccatattgatctaccactcgaaacagattccccaacggcattcagtgtttcacaccgccaaagtacgaatttgcccgtagagtacaccggtattccagtggaggtggtgaccgatcctaacatcttgatgggcatgcaaaccagcgtgcacattgcggagctagtgaaggcatgttacccgtcaccagaattagtgagcgctgtaggggtgcacgtgaattggctcaacgaagtcttgctccgagttgtccagaaggaatctcagttgcaagggaccgaggcctacaacgagtgccttgcgcttttaggtcgcattcaatgtgtcatgaagatggggccgtttgtctcggtagtgccgcagctgcaatacagaatgtacggtagcctcatcaaccaaatggcccaagtagcacaaaactacgaccgagaattcaagcaattcaaattattcatcatccaaaatcaaatccttggcagctatttgctgcagcagaacagggcatttgctgagagggagctgcagatggagagctttcatgctgctgtcatttctcaaagaagggaggagttggacaatacattcgcaaagatggaccgattgagcgggcaaatggaggcagagagtagtgcaatggagcaagccaaaaaggaaatggacgaaggattgaggcagttccagaataggcaagttgcgaacgccctctttgccgttcttagcgctgtagctcagattgggcttgcattccttacggctggtgcaacggctcctggagctgtggcgtcggcggggcaagctgtgagcatagcaggtcaggcggcgcaaggtctgcgaagggtggtggaaattctagagcagctggaggctgtgatggaggttgtggctgctgtgaaggaccttgtggatgctctggaccaggtaagtcagattgtggatgcaccacctatgccagacatgccctcggaggcggactggagtatttttgtgaatgagattgaagccgtggcagaggggatgccgacggaagtctcggaggttccggcgtggaaggccaagtgcaagaatgtggctgcactgggtagggagatgtgcatcacggcagaacagatttcccagctccagtatgacatctgggtgcaaggcttgttgcgggatatggctcgaagccaggcagacaggctggccgcaattcaacctgctaatcttaccaactatttggagatggcaatacagatggatatgcggactacgaggatactgatagggctcctcaacataatgcgcatccagaatgcggcacttatgtatgagtaccttctaacgcccacgcagctcactgcatggccgctgagaatggatactgtggccaacttgctcatcacgcacgagagtgctgcactgtcaggattagctcagttagggcccccatcggacttcacgagcaggcatgtagtgaaaggcatacctgtgagcttgcttctagacggtggggattgggaatttgagattcctgtgcaaggtggcatgtccagtttcccttccagctggactcgagtgcggattcggcacctggagatgcactttgtgcaggaggcgagcggtggcggcgagattatccaccagcctgccacccagacggggaccatttacatcctcctgcagggctccactgtcttccatgatcgcagaagggaggaggtgatgacctttcaggcagcggttccgctcaactaccattacgcgtaccgcctcgacactggagaagccactcttacgaacgagccctcggaacagtttgccaacacattcatgcagatgacaccgttcactcactggaggctacgtctgtctgcgtccgcagcggagaataaaggattagcctttcccacagctacagctcccgactccaccactgagattgccatcactttccatgttacggccattagacaaattgactggcggcaagaggaggag

SEQ ID NO: 429 - DNA, 2559 bp, synthetic construct
  misc_feature 1..2559: note = Synthetic
  source 1..2559: mol_type = other DNA
atggattacagcacgctttacagggatctgaaccagataagcatgcccctggatcgggtagagttctcagaggtgatggtaatccacaggatgtacttgaggttatctgatctgaatgtgggggagctccccggagccgagagggtgaagcggttgtatgtgttggcagacgtggtggagctcgcaacatttgcgcatccacagttgcttaatacgcggatgccaggatcggtgacggtgatcattctgtgtcgtcttcttcagtttccaactgatgggtcgttcgctgcttggctcgagctgccgttcatggagttgcacacactcatagaacaatacaggtcagagataaaagcagcagatgacgcgaaatggggaacgtatgtacacgcggaggaagtacagctcagcccgctgtttaatgggtggccttatctggttgttgaggcacagcgctgtattataaccgcggccatgcacaatacatttaaccgccctgggtgggttcgctccattactcaatttacaactgatcagtccggtcgggtagataccacactgctcgcacgaacagaattcggccatattgatctaccactcgaaacagattccccaacggcattcagtgtttcacaccgccaaagtacgaatttgcccgtagagtacaccggtattccagtggaggtggtgaccgatcctaacatcttgatgggcatgcaaaccagcgtgcacattgcggagctagtgaaggcatgttacccgtcaccagaattagtgagcgctgtaggggtgcacgtgaattggctcaacgaagtcttgctccgagttgtccagaaggaatctcagttgcaagggaccgaggcctacaacgagtgccttgcgcttttaggtcgcattcaatgtgtcatgaagatggggccgtttgtctcggtagtgccgcagctgcaatacagaatgtatggtagcctcatcagacaaatggcccaggtagcacaaaactacgaccgagaattcaagcaattcaaattattcatcatccaaaatcaaatccttggcagctatttgctgcagcagaacagggcatttgctgagagggagctgcagatggagagctttcatgctgctgtcatttctcaaagaagggaggagttggacaatacattcgcaaagatggaccgattgagcgggcaaatggaggcagagagtagtgcaatggagcaagccaaaaaggaaatggacgaaggattgaggcagttccagaataggcaagttgcaagggctgtgttcgctgttcttaaatctgtagctatgattgcgctcgcattcgtcacggctggtgcaacggctcctggggctgcagcatctgcagcgcaagctgtgaacatagccggtcaagcggcacaagctctgcgaagggtggtggaaattctagagcagctggaggctgtgatggaggttgtggctgctataaagcaccttgtggatgctctggaccaggtaagtcagattgtggatgcaccacctatgccagacatgccctcggaggcggactggagtatttttgtgaatgagattgaagccgtggcagaggggatgccgacggaagtctcggaggttccggtgtggagggccaagtgcaagaatgtggctgcactgggtcgggagatgagcatcacggcagtacagatgtcggagctgcagtatgacatctgggtgcaaggcatgatgcgggatatggctcgaagccaggcagacaggctggccgcaattcaacccgcggaccttaccaactatttggagatggctacccagatggatatgcggactacgaggatgctgctggggctcctcaacataatgcgcatccagaatgcggcacttatgtatgagtaccttctaacgcccacgcagctcactgcatggccgctgagaatggatactgtggccaacttgctcatcacgcacgagagtgctgcactgtcaggattagctcagttagggcccccatcggacttcacgagcaggcatgtagtgaaaggcatacctgtgagcttgcttctagacggtggggattgggaatttgagattcctgtgcaaggtggcatgtccagtttcccttccagctggactcgagtgcggattcggcacctggagatgcactttgtgaaggaggccagcggtattggtggtgagattatccaccagcctgccacccagacggggaccatttacatcctcctgcagggctccactgtcttccatgatcgcagaagggaggaggtgatgacctttcaggcagcggttccgctcaactaccattacgcgtaccgcctcgacactggagaagccactcttacgaacgagccctcggaacagtttgccaacacattcatgcagatgacaccgttcactcactggaggctacgtctgtctgcgtccgcagcggagaataaaggattagcctttcccacagctacagctcccgactccaccactgagattgccatcactttccatgttacggccattagacaaattgactggcggcaagaggaggag

SEQ ID NO: 430 - DNA, 2559 bp, synthetic construct
  misc_feature 1..2559: note = Synthetic
  source 1..2559: mol_type = other DNA
atggattacagcacgctttacagggatctgaaccagataagcatgcccctggatcgggtagagttctcagaggtgatggtaatccacaggatgtacttgaggttatctgatctgaatgtgggggagctccccggagccgagagggtgaagcggttgtatgtgttggcagacgtggtggagctcgcaacatttgcgcatccacagttgcttaatacgcggatgccaggatcggtgacggtgatcattctgtgtcgtcttcttcagtttccaactgatgggtcgttcgctgcttggctcgagctgccgttcatggagttgcacacactcatagaacaatacaggtcagagataaaagcagcagatgacgcgaaatggggaacgtatgtacacgcggaggaagtacagctcagcccgctgtttaatgggtggccttatctggttgttgaggcacagcgctgtattataaccgcggccatgcacaatacatttaaccgccctgggtgggttcgctccattactcaatttacaactgatcagtccggtcgggtagataccacactgctcgcacgaacagaattcggccatattgatctaccactcgaaacagattccccaacggcattcagtgtttcacaccgccaaagtacgaatttgcccgtagagtacaccggtattccagtggaggtggtgaccgatcctaacatcttgatgggcatgcaaaccagcgtgcagattgcggagctagtgaaggcatgttacccgtcaccagaattagtgagcgctgtaggggtgcacgtgaattggctcaacgaagtcttgctccgagttgtccagaaggaatctcagttgcaagggaccgaggcctacaacgagtgccttgcgcttttaggtcgcattcaatgtgtcatgaagatggggccgtttgtctcggtagtgccgcagctgcaatacagaatgtatggtagcctcatcagacaaatggcccaggtagcacagaactacgaccaagatttcaggcagctcaagttattcattgcccaaaaccaaatccttggcagctatttgctgcagcagaacaaggcctttgctgacagagaggtgcagatggagagctttcattcagcggtcatttctcaaagaaggcaggagttggacgacgccatcgctaagatggaccgactgagcttgcagatggaggaagaggacagagcaatggagcaagcccgaaaagaaatggaagaaggattgaagcagttccagaatgagcaagttgcaagggctgtgttcgctgttcttaaatctgtagctatgattgcgctcgcattcgtcacggctggtgcaacggctcctggggctgcagcatctgcagcgcaagctgtgaacatagccggtcaagcggcacaagctctgcgaagggtggtggaaattctagaggggctcgaggctgtgatggaggttgtggctgctataaagcaccttgtggatgctctggaccaggtaagtcagattgtggatgcaccacctatgccagacatgccctcggaggcggactggagtatttttgtgaatgagattgaagccgtggcagaggggatgccgacggaagtctcggaggttccggcgtggaaggccaagtgcaagaatgtggctgcactgggtcgggagatgagcatcacggcagtacagatgtcggagctgcagtatgacatctgggtgcaaggcttgttgcgggatatagctcaaagccacgcagaccggctggcagcgattcaacctgctaatcttaccaactatttggagatggcaatacagatggatatgcggactacgaggatactgatagggctcctcaacataatgcgcatccagaatgcggcacttatgtatgagtaccttctaacgcccacgcagctcactgcatggccgctgagaatggatactgtggccaacttgctcatcacgcacgagagtgctgcactgtcaggattagctcagttagggcccccatcggacttcacgagcaggcatgtagtgaaaggcatacctgtgagcttgcttctagacggtggggattgggaatttgagattcctgtgcaaggtggcatgtccagtttcccttccagctggactcgagtgcggattcggcacctggagatgcactttgtgaaggaggccagcggtattggtggtgagattatccaccagcctaccacccagactgggaccgtttacatccttctgcagggttccactatcttccatgaccgcagaagagaccaggtgttgccttttcaggccgctgctccgctcaactaccattacgcgtaccgcctcgacactggagaagccactcttacgaacgagccctcggaacagtttgccaacacattcatgcagatgacaccgttcactcactggaggctacgtctgtctgcgtccgcagcggagaataaaggattagcctttcccacagctacagctcccgactccaccactgagattgccatcactttccatgttacggccattagacaaattgactggcggcaagaggaggag

SEQ ID NO: 431 - DNA, 2556 bp, synthetic construct
  misc_feature 1..2556: note = Synthetic
  source 1..2556: mol_type = other DNA
atggattacagcacgctttacagggatctgaaccagataagcatgcccctggatcgggtagagttctcagaggtgatggtaatccacaggatgtacttgaggttatctgatctgaatgtgggggagctccccggagccgagagggtgaagcggttgtatgtgttggcagacgtggtggagctcgcaacatttgcgcatccacagttgcttaatacgcggatgccaggatcggtgacggtgatcattctgtgtcgtcttcttcagtttccaactgatgggtcgttcgctgcttggctcgagctgccgttcatggagttgcacacactcatagaacaatacaggtcagagataaaagcagcagatgacgcgaaatggggaacgtatgtacacgcggaggaagtacagctcagcccgctgtttaatgggtggccttatctggttgttgaggcacagcgctgtattataaccgcggccatgcacaatacatttaaccgccctgggtgggttcgctccattactcaatttacaactgatcagtccggtcgggtagataccacactgctcgcacgaacagaattcggccatattgatctaccactcgaaacagattccccaacggcattcagtgtttcacaccgccaaagtacgaatttgcccgtagagtacaccggtattccagtggaggtggtgaccgatcctaacatcttgatgggcatgcaaaccagcgtgcacattgcggagctagtgaaggcatgttacccgtcaccagaattagtgagcgctgtaggggtgcacgtgaattggctcaacgaagtcttgctccgagttgtccagaaggaatctcagttgcaagggaccgaggcctacaacgagtgccttgcgcttttaggtcgcattcaatgtgtcatgaagatggggccgtttgtctcggtagtgccgcagctgcaatacagaatgtatggtagcctcatcagacaaatggcccaggtagcacagaactacgaccaagatttcaggcagctcaagttattcattgcccaaaaccaaatccttggcagctatttgctgcagcagaacaaggcctttgctgacagagaggtgcagatggagagctttcattcagcggtcatttctcaaagaaggcaggagttggacgacgccatcgctaagatggaccgactgagcttgcagatggaggaagaggacagagcaatggagcaagcccgaaaagaaatggaagaaggattgaagcagttccagaatgagcaagttgcaagggctgtgttcgctgttcttaaatctgtagctatgattgcgctcgcattcgtcacggctggtgcaacggctcctggggctgcagcatctgcagcgcaagctgtgaacatagccggtcaagcggcacaagctctgcgaagggtggtggaaattctagagcagctggaggctgtgatggaggttgtggctgctgtgaaggacctcgtggattcattggaacaggtaggtcagattgtggacgcaccggtgatgccggaattgccctcagaggcggactggtccatttttgtgaacgaggtggaggccgtggcagagggcatgccaacggaagtctcggaggttccggtgtggagggccaagtgcaagaatgtggctgcactgggtcgggagatgagcatcacggcagtacagatgtcggagctccagtatgacatctgggtgcaaggcttgttgcgggatatagctcaaagccacgcagaccggctggcagcgattcaacctgctaatcttaccaactatttggagatggcaatacagatggatatgcggactacgaggatactgatagggctcctcaacataatgcgcatccagaatgcggcacttatgtatgagtaccttctaacgcccacgcagctcactgcatggccgctgagaatggatactgtggccaacttgctcatcacgcacgagagtgctgcactgtcaggattagctcagttagggcccccatcggacttcacgagcaggcatgtagtgaaaggcatacctgtgagcttgcttctagacggtggggattgggaatttgagattcctgtgcaagctggcatgtccagtttcccttccagctggactcgagtgcggattcggcacctggagatgcactttgtgcaggaggcgagcggtggcggcgagattatccaccagcctgccacccagacggggaccatttacatcctcctgcagggctccactgtcttccatgatcgcagaagggaggaggtgatgacctttcaggcagcggttccgctcaactaccattacgcgtaccgcctcgacactggagaagccactcttacgaacgagccctcggaacagtttgccaacacattcatgcagatgacaccgttcactcactggaggctacgtctgtctgcgtccgcagcggagaataaaggattagcctttcccacagctacagctcccgactccaccactgagattgccatcactttccatgttacggccattagacaaattgactggcggcaagaggaggag

SEQ ID NO: 432 - DNA, 2553 bp, synthetic construct
  misc_feature 1..2553: note = Synthetic
  source 1..2553: mol_type = other DNA
atggattacagcacgctttacagggatctgaaccagataagcatgcccctggatcgggtagagttctcagaggtgatggtaatccacaggatgtacttgaggttatctgatctgaatgtgggggagctccccggagccgagagggtgaagcggttgtatgtgtttgcagacgtggtggagctcgcaacatttgcgcatccacagttgcttaatacgcggatgccaggatcggtgacggtgatcattctgtgtcgtcttcttcagtttccaactgatgggtcgttcgctgcttggctcgagctgccgttcatggagttgcacacactcatagaacaatacaggtcagagataaaagcagcagatgacgcgaaatggggaacgtatgtacacgcggaggaagtacagctcagcccgctgtttaatgggtggccttatctggttgttgaggcacagcgctgtattataaccgcggccatgcacaatacatttaaccgccctgggtgggttcgctccattactcaatttacaactgatcagtccggtcgggtagataccacactgctcgcacgaacagaattcggccatattgatctaccactcgaaacagattccccaacggcattcagtgtttcacaccgccaaagtacgaatttgcccgtagagtacaccggtattccagtggaggtggtgaccgatcctaacatcttgatgggcatgcagacaacggtacacattgcggagctagtcaaggcatgtcatccgtcacccgatgttgtgagcgctgtaggggagcacctgaactggctcaacaaactcttactcccacttaaggaatcgactcagttgcaaggaagcgagtcgtacaaggagtgccttgcactcttgggtcgtgttcacgctgcgatgaagatggtgagaattggcttagtagtgccccagctgcaatacagaatgtacggtagcctcatcaaccaaatggcccaagtagcacaaaactacgaccgagaattcaagcaattcaaattattcatcatccaaaatcaaatccttggcagctatttgctgcagcagaacagggcatttgctgagagggagctgcagatggagagctttcattcagcggtcatttctcaaagaaggcaggagttggacgacgccatcgctaagatggaccgactgagcttgcagatggaggaagaggacagagcaatggagcaagcccgaaaagaaatggaagaaggattgaagcagttccagaatgagcaagttgcaagggctgtgttcgctgttcttaaatctgtagctatgattgcgctcgcattcgtcacggctggtgcaacggctcctggagctgtggcgtcggcggggcaagctgtgagcatagcaggtcaggcggcgcaaggtctgcgaagggtggtggaaattctagaggggctcgaggctgtgatggaggttgtggctgctataaagcaccttgtggatgctctggaccaggtaagtcagattgtggatgcaccacctatgccagacatgccctcggaggcggactggagtatttttgtgaatgagattgaagccgtggcagaggggatgccgacggaagtctcggaggttccggcgtggaaggccaagtgcaagaatgtggctgcactgggtagggagatgtgcatcacggcagaacagatttcccagctccagtatgacatctgggtgcaaggcttgttgcgggatatagctcaaagccacgcagaccggctggcagcgattcaacctgctaatcttaccaactatttggagatggcaatacagatggatatgcggactacgaggatactgatagggctcctcaacataatgcgcatccagaatgcggcacttatgtatgagtaccttctaacgcccacgcagctcactgcatggccgctgagaatggatactgtggccaacttgctcatcacgcacgagagtgctgcactgtcaggattagctcagttagggcccccatcggacttcacgagcaggcatgtagtgaaaggcatacctgtgagcttgcttctagacggtggggattgggaatttgagattcctgtgcaaggtggcatgtccagtttcccttccagctggactcgagtgcggattcggcacctggagatgcactttgtgcaggaggcgagcggtggcggcgagattatccaccagcctgccacccagacggggaccatttacatcctcctgcagggttccactatcttccatgaccgcagaagagaccaggtgttgccttttcaggccgctgctccgctcaactaccattacgcgtaccgcctcgacaccggcgactccactctcacaaacgaaccctctgaacagtttgccaacaagttcatgcagatgacacccttcacccgttggaggcttcgtctgtctgcgtccgcagcggagaataaaggattagcctttcccacagctacagctcccgactccaccactgagattgccatcactttccatgttacggccattagacaaattgactggcggcaagaggaggag

SEQ ID NO: 433 - DNA, 2563 bp, synthetic construct
  misc_feature 1..2563: note = Synthetic
  source 1..2563: mol_type = other DNA
atggattacagcacgctttacagggatctgaaccagataagcatgcccctggatcgggtagagttctcagaggtgatggtaatccacaggatgtacttgaggttatctgatctgaatgtgggggagctccccggagccgagagggtgaagcggttgtatgtgttggcagacgtggtggagctcgcaacatttgcgcatccacagttgcttaatacgcggatgccaggatcggtgacggtgatcattctgtgtcgtcttcttcagtttccaactgatgggtcgttcgctgcttggctcgagctgccgttcatggagttgcacacactcatagaacaatacaggtcagagataaaagcagcagatgacgcgaaatggggaacgtatgtacacgcggaggaagtacagctcagcccgctgtttaatgggtggccttatctggttgttgaggcacagcgctgtattataaccgcggccatgcacaatacatttaaccgccctgggtgggttcgctccattactcaatttacaactgatcagtccggtcgggtagataccacactgctcgcacgaacagaattcggccatattgatctaccactcgaaacagattccccaacggcattcagtgtttcacaccgccaaagtacgaatttgcccgtagagtacaccggtattccagtggaggtggtgaccgatcctaacatcttgatgggcatgcaaaccagcgtgcacattgcggagctagtcaaggcatgtcatccgtcacccgatgttgtgagcgctgtaggggtgcacgtgaattggctcaacgaagtcttgctccgagttgtccagaaggaatctcagttgcaagggaccgaggcctacaacgagtgccttgcgcttttaggtcgcattcaatgtgtcatgaagatggggccgtttgtctcggtagtgccgcagctgcaatacagaatgtatggtagcctcatcagacaaatggcccaggtagcacagaactacgaccaagatttcaggcagctcaagttattcattgcccaaaaccaaatccttggcagctatttgctgcagcagaacaaggcctttgctgacagagaggtgcagatggagagctttcattcagcggtcatttctcaaagaaggcaggagttggacgacgccatcgctaagatggaccgactgagcttgcagatggaggaagaggacagagcaatggagcaagcccgaaaagaaatggaagaaggattgaagcagttccagaatgagcaagttgcaagggctgtgttcgctgttcttaaatctgtagctatgattgcgctcgcattcgtcacggctggtgcaacggctcctggggctgcagcatctgcagcgcaagctgtgaacatagccggtcaagcggcacaagctctgcgaagggtggtggaaattctagagcagctggaggctgtgatggaggttgtggctgctgtgaaggacctcgtggattcattggaccaggtaggtcagattgtggacgcaccggtgatgccggaattgccctcagaggcggactggtccatttttgtgaacgaggtggaggccgtggcagaggggatgccgacggaagtctcggaggttccggcgtggaaggccaagtgcaagaatgtggctgcactgggtagggagatgtgcatcacggcagaacagatttcccagctccagtatgacatctgggtgcaaggcttgttgcgggatatagctcaaagccacgcagaccggctggcagcgattcaacctgctaatcttaccaactatttggagatggcaatacagatggatatgcggactacgaggatactgatagggctcctcaacataatgcgcatccagaatgcggcacttatgtatgagtaccttctaacgcccacgcagctcactgcatggccgctgagaatggatactgtggccaacttgctcatcacgcacgagagtgctgcactgtcaggattagctcagttagggcccccatcggacttcacgagcaggcatgtggtgaaagacatacctgtgaacttgctgctcgatggcgaggattgggagtttgagattcctgtgcaagctggcatgtccagcttcccttccagctggtctcgcgtccgtattcggcacctggagatgcactttgtgaaggaggccagcggtattggtggtgagattatccaccagcctaccacccagactgggaccgtttacatccttctgcagggttccactatcttccatgaccgcagaagagaccaggtgttgccttttcaggccgctgctccgctcaactaccattacgcgtaccgcctcgacaccggcgactccactctcacaaacgaaccctctgaacagtttgccaacaagttcatgcagatgacacccttcacccgttggaggcttcgtctgtctgcgtccgcaaaagagaatgcaggattagcctttcccacggctacagcacttgactccactacccagattgtcatcactttccatgttacggccatcagacaaattgactggcggcacgacgaagagtagc

SEQ ID NO: 434 - DNA, 2559 bp, synthetic construct
  misc_feature 1..2559: note = Synthetic
  source 1..2559: mol_type = other DNA
atggattacagcacgctttacagggatctgaaccagataagcatgcccctggatcgggtagagttctcagaggtgatggtaatccacaggatgtacttgaggttatctgatctgaatgtgggggagctccccggagccgagaaagtgaagcggttgtatgtgttggcggacgtggtggagctcgcaacatttgcgcatccacagttgcttaatacgcggatgccaggatcggtgacggtgatcattctgtgtcgtcttcttcagtttccaactgatgggtcgttcgctgcttggctcgagctgccgttcatggagttgcacacactcatagaacaatacaggtcagagataaaagcagcagatgacgcgaaatggggaacgtatgtacacgcggaggaagtacagctcagcccgctgtttaatgggtggccttatctggttgttgaggcacagcgctgtattataaccgcggccatgcacaatacatttaaccgccctgggtgggttcgctccattactcaatttacaactgatcagtccggtcgggtagataccacactgctcgcacgaacagaattcggccatattgatctaccactcgaaacagattccccaacggcattcagtgtttcacaccgccaaagtacgaatttgcccgtagagtacaccggtattccagtggaggtggtgaccgatcctaacatcttgatgggcatgcaaaccagcgtgcacattgcggagctagtgaaggcatgttacccgtcaccagaattagtgagcgctgtaggggtgcacgtgaattggctcaacgaagtcttgctccgagttgtccagaaggaatctcagttgcaagggaccgaggcctacaacgagtgccttgcgcttttaggtcgcattcaatgtgtcatgaagatggggccgtttgtctcggtagtgccgcagctgcaatacagaatgtatggtagcctcatcagacaaatggcccaggtagcacagaactacgaccaagatttcaggcagctcaagttattcattgcccaaaaccaaatccttggcagctatttgctgcagcagaacaaggcctttgctgacagagaggtgcagatggagagctttcattcagcggtcatttctcaaagaaggcaggagttggacgacgccatcgctaagatggaccgactgagcttgcagatggaggaagaggacagagcaatggagcaagccaaaaaggaaatggacgaaggattgaggcagttccagaataggcaagttgcgaacgccctctttgccgttcttagcgctgtagctcagattgggcttgcattccttacggctggtgcaacggctcctggagctgtggcgtcggcggggcaagctgtgagcatagcaggtcaggcggcgcaaggtctgcgaagggtggtggaaattctagagcagctggaggctgtgatggaggttgtggctgctataaagcaccttgtggatgctctggaccaggtaagtcagattgtggatgcaccacctatgccagacatgccctcggaggcggactggagtatttttgtgaatgagattgaagccgtggcagaggggatgccgacggaagtctcggaggttccggcgtggaaggccaagtgcaagaatgtggctgcactgggtagggagatgtgcatcacggcagaacagatttcccagctccagtatgacatctgggtgcaaggcttgttgcgggatatagctcaaagccaggcagacaggctggccgcaattcaacccgcggaccttaccaactatttggagatggctacccagatggatatgcggactacgaggatgctgctggggctcctcaacatattgcgcatccagaatgcggcgctcaggtacgagtatcttctaatgcccacggagctcacaacatggccactgggtatggataccgtgggtgacttgctcatcgcgcaggagaatgctgcactgataggattaatgcagctagggccctcatctgatttcacgagcaggcatgtggtgaaagacatacctgtgaacttgctgctcgatggcgaggattgggagtttgagattcctgtgcaagctggcatgtccagcttcccttccagctggtctcgcgtccgtattcggcacctggagatgcactttgtgaaggaggccagcggtattggtggtgagattatccaccagcctaccacccagactgggaccgtttacatccttctgcagggttccactatcttccatgaccgcagaagagaccaggtgttgccttttcaggccgctgctccgctcaactaccattacgcgtaccgcctcgacactggagaagccactcttacgaacgagccctcggaacagtttgccaacacattcatgcagatgacaccgttcactcactggaggctacgtctgtctgcgtccgcagcggagaataaaggattagcctttcccacagctacagctcccgactccaccactgagattgccatcactttccatgttacggccattagacaaattgactggcggcaagaggaggag

SEQ ID NO: 435 - DNA, 2559 bp, synthetic construct
  misc_feature 1..2559: note = Synthetic
  source 1..2559: mol_type = other DNA
atggattacagcacgctttacagggatctgaaccagataagcatgcccctggatcgggtagagttctcagaggtgatggtaatccacaggatgtatgtgaggctagctgatctgaatgtgggggagctccccggagccgagaaagtgaagcggttgtatgtgttggcagacgtggtggagctcgcaacatttgcgcatccacagttgcttaatacgcggatgccaggatcggtgacggtgatcattctgtgtcgtcttcttcagtttccaactgatgggtcgttcgctgcttggctcgagctgccgttcatggagttgcacacactcatagaacaatacaggtcagagataaaagcagcagatgacgcgaaatggggaacgtatgtacacgcggaggaagtacagctcagcccgctgtttaatgggtggccttatctggttgttgaggcacagcgctgtattataaccgcggccatgcacaatacatttaaccgccctgggtgggttcgctccattactcaatttacaactgatcagtccggtcgggtagataccacactgctcgcacgaacagaattcggccatattgatctaccactcgaaacagattccccaacggcattcagtgtttcacaccgccaaagtacgaatttgcccgtagagtacaccggtattccagtggaggtggtgaccgatcctaacatcttgatgggcatgcaaaccagcgtgcacattgcggagctagtgaaggcatgttacccgtcaccagaattagtgagcgctgtaggggtgcacgtgaattggctcaacgaagtcttgctccgagttgtccagaaggaatctcagttgcaagggaccgaggcctacaacgagtgccttgcgcttttaggtcgcattcaatgtgtcatgaagatggggccgtttgtctcggtagtgccgcagctgcaatacagaatgtatggtagcctcatcagacaaatggcccaggtagcacagaactacgaccaagatttcaggcagctcaagttattcattgcccaaaaccaaatccttggcagctatttgctgcagcagaacaaggcctttgctgacagagaggtgcagatggagagctttcattcagcggtcatttctcaaagaaggcaggagttggacgacgccatcgctaagatggaccgactgagcttgcagatggaggaagaggacagagcaatggagcaagcccgaaaagaaatggaagaaggattgaagcagttccagaatgagcaagttgcaagggctgtgttcgctgttcttaaatctgtagctatgattgcgctcgcattcgtcacggctggtgcaacggctcctggggctgcagcatctgcagcgcaagctgtgaacatagccggtcaagcggcacaagctctgcgaagggtggtggaaattctagagcagctggaggctgtgatggaggttgtggctgctgtgaaggacctcgtggattcattggaacaggtaggtcagattgtggacgcaccggtgatgccggaattgccctcagaggcggactggtccatttttgtgaacgaggtggaggccgtggcagagggcatgccaacggaagtctcggaggttccggcgtggaaggccaagtgcaagaatgtggctgcactgggtagggagatgagcatcacggcagaacagatttcccagctccagtatgacatctgggtgcaaggcttgttgcgggatatagctcaaagccacgcagaccggctggcagcgattcaacctgctaatcttaccaactatttggagatggcaatacagatggatatgcggactacgaggatactgatagggctcctcaacataatgcgcatccagaatgcggcacttatgtatgagtaccttctaacgcccacgcagctcactgcatggccgctgagaatggatactgtggccaacttgctcatcacgcacgagagtgctgcactgtcaggattagctcagttagggcccccatcggacttcacgagcaggcatgtagtgaaaggcatacctgtgagcttgcttctagacggtggggattgggaatttgagattcctgtgcaaggtggcatgtccagtttcccttccagctggactcgagtgcggattcggcacctggagatgcactttgtgaaggaggccagcggtattggtggtgagattatccaccagcctaccacccagacggggaccatttacatcctcctgcagggctccactgtcttccatgatcgcagaagggaggaggtgatgacctttcaggcagcggttccgctcaactaccattacgcgtaccgcctcgacaccggcgactccactctcacaaacgaaccctctgaacagtttgccaacaagttcatgcagatgacacccttcacccgttggaggcttcgtctgtctgcgtccgcaaaagagaatgcaggattagcctttcccacggctacagcacttgactccactacccagattgtcatcactttccatgttacggccatcagacaaattgactggcggcacgacgaagag

SEQ ID NO: 436 - DNA, 2556 bp, synthetic construct
  misc_feature 1..2556: note = Synthetic
  source 1..2556: mol_type = other DNA
atggattacagcacgctttacagggatctgaaccagataagcatgcccctggatcgggtagagttctcagaggtgatggtaatccacaggatgtacttgaggttatctgatctgaatgtgggggagctccccggagccgagagggtgaagcggttgtatgtgttggcagacgtggtggagctcgcaacatttgcgcatccacagttgcttaatacgcggatgccaggatcggtgacggtgatcattctgtgtcgtcttcttcagtttccaactgatgggtcgttcgctgcttggctcgagctgccgttcatggagttgcacacactcatagaacaatacaggtcagagataaaagcagcagatgacgcgaaatggggaacgtatgtacacgcggaggaagtacagctcagcccgctgtttaatgggtggccttatctggttgttgaggcacagcgctgtattataaccgcggccatgcacaatacatttaaccgccctgggtgggttcgctccattactcaatttacaactgatcagtccggtcgggtagataccacactgctcgcacgaacagaattcggccatattgatctaccactcgaaacagattccccaacggcattcagtgtttcacaccgccaaagtacgaatttgcccgtagagtacaccggtattccagtggaggtggtgaccgatcctaacatcttgctgggcatgcaaaccagcgtgcacattgcggagctagtgaaggcatgttacccgtcaccagaattagtgagcgctgtaggggtgcacgtgaattggctcaacaaactcttactcccacttaaggaatcgactcagttgcaaggaagcgagtcgtacaaggagtgccttgcactcttgggtcgtgttcacgctgcgatgaagatggtgagaattggcttagtagtgccccagctgcaatacagaatgtacggtagcctcatcaaccaaatggcccaagtagcacaaaactacgaccgagaattcaagcagctcaagttattcattgcccaaaaccaaatccttggcagctatttgctgcagcagaacagggcatttgctgagagggagctgcagatggagagctttcattcagcggtcatttctcaaagaaggcaggagttggacgacgccatcgctaagatggaccgactgagcttgcagatggaggaagaggacagagcaatggagcaagcccgaaaagaaatggaagaaggattgaagcagttccagaatgagcaagttgcaagggctgtgttcgctgttcttaaatctgtagctatgattgcgctcgcattcgtcacggctggtgcaacggctcctggggctgcagcatctgcagcgcaagctgtgaacatagccggtcaagcggcacaagctctgcgaagggtggtggaaattctagaggggctcgaggctgtgatggaggttgtggctgctataaagcaccttgtggatgctctggaccaggtaagtcagattgtggatgcaccacctatgccagacatgccctcggaggcggactggagtatttttgtgaatgagattgaagccgtggcagaggggatgccgacggaagtctcggaggttccggcgtggaaggccaagtgcaagaatgtggctgcactgggtagggagatgtgcatcacggcagaacagatttcccagctccagtatgacatctgggtgcaaggcttgttgcgggatatagctcaaagccacgcagaccggctggcagcgattcaacctgctaatcttaccaactatttggagatggcaatacagatggatatgcggactacgaggatactgatagggctcctcaacataatgcgcatccagaatgcggcacttatgtatgagtaccttctaacgcccacgcagctcactgcatggccgctgagaatggatactgtggccaacttgctcatcacgcacgagagtgctgcactgtcaggattagctcagttagggcccccatcggacttcacgagcaggcatgtagtgaaaggcatacctgtgagcttgcttctagacggtggggattgggaatttgagattcctgtgcaaggtggcatgtccagtttcccttccagctggactcgagtgcggattcggcacctggagatgcactttgtgcaggaggccagcggtattggtggtgagattatccaccagcctgccacccagactgggaccatttacatcctcctgcagggctccactgtcttccatgatcgcagaagggaggaggtgatgacctttcaggcagcggttccgctcaactaccattacgcgtaccgcctcgacactggagaagccactcttacgaacgagccctcggaacagtttgccaacacattcatgcagatgacaccgttcactcactggaggctacgtctgtctgcgtccgcagcggagaataaaggattagcctttcccacagctacagctcccgactccaccactgagattgccatcactttccatgttacggccattagacaaattgactggcggcaagaggaggag

SEQ ID NO: 437 - DNA, 2502 bp, synthetic construct
  misc_feature 1..2502: note = Synthetic
  source 1..2502: mol_type = other DNA
atggattacagcacgctttacagggatctgaaccagataagcatgcccctggatcgggtagagttctcagaggtgatggtaatccacaggatgtacttgaggttatctgatctgaatgtgggggagctccccggagccgagagggtgaagcggttgtatgtgttggcagacgtggtggagctcgcaacatttgcgcatccacagttgcttaatacgcggatgccaggatcggtgacggtgatcattctgtgtcgtcttcttcagtttccaactgatgggtcgttcgctgcttggctcgagctgccgttcatggagttgcacacactcatagaacaatacaggtcagagataaaagcagcagatgacgcgaaatggggaacgtatgtacacgcggaggaagtacagctcagcccgctgtttaatgggtggccttatctggttgttgaggcacagcgctgtattataaccgcggccatgcacaatacatttaaccgccctgggtgggttcgctccattactcaatttacaactgatcagtccggtcgggtagataccacactgctcgcacgaacagaattcggccatattgatctaccactcgaaacagattccccaacggcattcagtgtttcacaccgccaaagtacgaatttgcccgtagagtacaccggtattccagtggaggtggtgaccgatcctaacatcttgatgggcatgcaaaccagcgtgcacattgcggagctagtgaaggcatgttacccgtcaccagaattagtgagcgctgtaggggtgcacgtgaattggctcaacgaagtcttgctccgagttgtccagaaggaatctcagttgcaagggaccgaggcctacaacgagtgccttgcgcttttaggtcgcattcaatgtgtcatgaagatggggccgtttgtctcggtagtgccgcagctgcaatacagaatgtatggtagcctcatcagacaaatggcccaggtagcacagaactacgaccaagatttcaggcagctcaagttattcattgcccaaaaccaaatccttggcagctatttgctgcagcagaacaaggcctttgctgacagagaggtgcagatggagagctttcattcagcggtcatttctcaaagaaggcaggagttggacgacgccatcgctaagatggaccgactgagcttgcagatggaggaagaggacagagcaatggagcaagcccgaaaagaaatggaagaaggattgaagcagttccagaatgagcaagttgcaagggctatgttcacagcttgcgctgcagatgctgcagcgcaagctgtgagcatagcaggtcaggcggcgcaaggtctgcgaagggtggtggaaattctagagcagctggaggctgtgatggaggttgtggctgctataaagcaccttgtggatgctctggaccaggtaagtcagattgtggacgcaccggtgatgccggaattgccctcagaggcggactggtccatttttgtgaacgaggtggaggccgtggcagagggcatgccaacggaagtctcggaggttccggtgtggagggccaagtgcaagaatgtggctgcactgggtagggagatgtgcatcacggcagaacagatttcccagctccagtatgacatctgggtgcaaggcttgttgcgggatatagctcaaagccacgcagaccggctggcagcgattcaacctgctaatcttaccaactatttggagatggcaatacagatggatatgcggactacgaggatactgatagggctcctcaacataatgcgcatccagaatgcggcacttatgtatgagtaccttctaacgcccacggagctcacaacatggccactgggtatggataccgtgggtgacttgctcatcgcgcaggagaatgctgcactgataggattaatgcagctagggccctcatctgatttcacgagcaggcatgtggtgaaagacatacctgtgaacttgctgctcgatggcgaggattgggagtttgagattcctgtgcaagctggcatgtccagcttcccttccagctggtctcgcgtccgtattcggcacctggagatgcactttgtgaaggaggccagcggtattggtggtgagattatccaccagcctaccacccagactgggaccgtttacatccttctgcagggttccactatcttccatgaccgcagaagagaccaggtgttgccttttcaggccgctgctccgctcaactaccattacgcgtaccgcctcgacactggagaagccactcttacgaacgagccctcggaacagtttgccaacacattcatgcagatgacaccgttcactcactggaggctacgtctgtctgcgtccgcagcggagaataaaggattagcctttcccacagctacagctcccgactccaccactgagattgccatcactttccatgttacggccattagacaaattgactggcggcaagaggaggag

SEQ ID NO: 438 - DNA, 2559 bp, synthetic construct
  misc_feature 1..2559: note = Synthetic
  source 1..2559: mol_type = other DNA
atggattacagcacgctttacagggatctgaaccagataagcatgcccctggatcgggtagagttctcagaggtgatggtaatccacaggatgtacttgaggttatctgatctgaatgtgggggagctccccggagccgagagggtgaagcggttgtatgtgttggcagacgtggtggagctcgcaacatttgcgcatccacagttgcttaatacgcggatgccaggatcggtgacggtgatcattctgtgtcgtcttcttcagtttccaactgatgggtcgttcgctgcttggctcgagctgccgttcatggagttgcacacactcatagaacaatacaggtcagagataaaagcagcagatgacgcgaaatggggaacgtatgtacacgcagaggaagtacagctcagcccgctgtttaatgggtggccttatctggttgttgaggcacagcgctgtattataaccgcggccatgcacaatacatttaaccgccctgggtgggttcgctccattactcaatttacaactgatcagtccggtcgggtagataccacactgctcgcacgaacagaattcggccatattgatctaccactcgaaacagattccccaacggcattcagtgtttcacaccgccaaagtacgaatttgcccgtagagtacaccggtattccagtggaggtggtgaccgatcctaacatcttgatgggcatgcaaaccagcgtgcacattgcggagctagtgaaggcatgttacccgtcaccagaattagtgagcgctgtaggggtgcacgtgaattggctcaacgaagtcttgctccgagttgtccagaaggaatctcagttgcaagggaccgaggcctacaacgagtgccttgcgcttttaggtcgcattcaatgtgtcatgaagatggtgagaattggcttagtagtgccccagctgcaatacagaatgtacggtagcctcatcaaccaaatggcccaagtagcacaaaactacgaccgagaattcaagcaattcaaattattcatcatccaaaatcaaatccttggcagctatttgctgcagcagaacagggcatttgctgagagggagctgcagatggagagctttcatgctgctgtcatttctcaaagaagggaggagttggacaatacattcgcaaagatggaccgattgagcgggcaaatggaggcagagagtagtgcaatggagcaagccaaaaaggaaatggacgaaggattgaggcagttccagaataggcaagttgcgaacgccctctttgccgttcttagcgctgtagctcagattgggcttgcattccttacggctggtgcaacggctcctggggctgtggcgtcggcggggcaagctgtgagcatagcaggtcaggcggcgcaaggtctgcgaagggtggtggaaattctagagcagctggaggctgtgatggaggttgtggctgctgtgaaggacctcgtggattcattggaacaggtaggtcagattgtggacgcaccggtgatgccggaattgccctcagaggcggactggagtatttttgtgaatgagattgaagccgtggcagaggggatgccgacggaagtctcggaggttccggcgtggaaggccaagtgcaagaatgtggctgcactgggtagggagatgtgcatcacggcagaacagatttcccagctccagtatgacatctgggtgcaaggcttgttgcgggatatagctcaaagccacgcagaccggctggcagcgattcaacctgctaatcttaccaactatttggagatggcaatacagatggatatgcggactacgaggatactgatagggctcctcaacataatgcgcatccagaatgcggcacttatgtatgagtaccttctaacgcccacggagctcacaacatggccactgggtatggataccgtgggtgacttgctcatcgcgcaggagaatgctgcactgataggattaatgcagctagggccctcatctgatttcacgagcaggcatgtggtgaaagacatacctgtgaacttgctgctcgatggcgaggattgggagtttgagattcctgtgcaagctggcatgtccagcttcccttccagctggtctcgcgtccgtattcggcacctggagatgcactttgtgaaggaggccagcggtattggtggtgagattatccaccagcctaccacccagactgggaccgtttacatccttctgcagggttccactatcttccatgaccgcagaagagaccaggtgttgccttttcaggccgctgctccgctcaactaccattacgcgtaccgcctcgacaccggcgactccactctcacaaacgaaccctctgaacagtttgccaacaagttcatgcagatgacacccttcacccgttggaggcttcgtctgtctgcgtccgcaaaagagaatgcaggattagcctttcccacggctacagcacttgactccactacccagattgtcatcactttccatgttacggccatcagacaaattgactggcggcacgacgaagag

SEQ ID NO: 439 - DNA, 2559 bp, synthetic construct
  misc_feature 1..2559: note = Synthetic
  source 1..2559: mol_type = other DNA
atggattacagcacgctttacagggatctgaaccagataagcatgcccctggatcgggtagagttctcagaggtgatggtaatccacaggatgtacttgaggttatctgatctgaatgtgggggagctccccggagccgagaaagtgaagcggttgtatgtgttggcagacgtggtggagctcgcaacatttgcgcatccacagttgcttaatacgcggatgccaggatcggtgacggtgatcattctgtgtcgtcttcttcagtttccaactgatgggtcgttcgctgcttggctcgagctgccgttcatggagttgcacacactcatagaacaatacaggtcagagataaaagcagcagatgacgcgaaatggggaacgtatgtacacgcggaggaagtacagctcagcccgctgtttaatgggtggccttatctggttgttgaggcacagcgctgtattataaccgcggccatgcacaatacatttaaccgccctgggtgggttcgctccattactcaatttacaactgatcagtccggtcgggtagataccacactgctcgcacgaacagaattcggccatattgatctaccactcgaaacagattccccaacggcattcagtgtttcacaccgccaaagtacgaatttgcccgtagagtacaccggtattccagtggaggtggtgaccgatcctaacatcttgatgggcatgcaaaccagcgtgcacattgcggagctagtgaaggcatgttacccgtcaccagaattagtgagcgctgtaggggtgcacgtgaattggctcaacgaagtcttgctccgagttgtccagaaggaatctcagttgcaagggaccgaggcctacaacgagtgccttgcgcttttaggtcgcattcaatgtgtcatgaagatggggccgtttgtctcggtagtgccgcagctgcaatacagaatgtatggtagcctcatcagacaaatggcccaggtagcacagaactacgaccaagatttcaggcagctcaagttattcattgcccaaaaccaaatccttggcagctatttgctgcagcagaacagggcatttgctgagagggagctgcagatggagagctttcatgctgctgtcatttctcaaagaagggaggagttggacaatacattcgcaaagatggaccgattgagcgggcaaatggaggcagagagtagtgcaatggagcaagccaaaaaggaaatggacgaaggattgaggcagttccagaataggcaagttgcgaacgccctctttgccgttcttagcgctgtagctcagattgggcttgcattccttacggctggtgcaacggctcctggagctgtggcgtcggcggggcaagctgtgagcatagcaggtcaggcggcgcaaggtctgcgaagggtggtggaaattctagagcagctggaggctgtgatggaggttgtggctgctgtgaaggacctcgtggattcattggaacaggtaggtcagattgtggacgcaccggtgatgccggaattgccctcagaggcggactggtccatttttgtgaacgaggtggaggccgtggcagagggcatgccaacggaagtctcggaggttccggtgtggagggccaagtgcaagaatgtggctgcactgggtagggagatgtgcatcacggcagaacagatttcccagctccagtatgacatctgggtgcaaggcttgttgcgggatatagctcaaagccacgcagaccggctggccgcaattcaacccgcggaccttaccaactatttggagatggctacccagatggatatgcggactacgaggatgctgctggggctcctcaacatattgcgcatccagaatgcggcgctcaggtacgagtatcttctaatgcccacggagctcacaacatggccactgggtatggataccgtgggtgacttgctcatcgcgcaggagaatgctgcactgataggattaatgcagctagggccctcatctgatttcacgagcaggcatgtggtgaaagacatacctgtgaacttgctgctcgatggcgaggattgggagtttgagattcctgtgcaagctggcatgtccagcttcccttccagctggtctcgcgtccgtattcggcacctggagatgcactttgtgaaggaggccagcggtattggtggtgagattatccaccagcctaccacccagactgggaccgtttacatccttctgcagggttccactatcttccatgaccgcagaagagaccaggtgttgccttttcaggccgctgctccgctcaactaccattacgcgtaccgcctcgacaccggcgactccactctcacaaacgaaccctctgaacagtttgccaacaagttcatgcagatgacacccttcacccgttggaggcttcgtctgtctgcgtccgcagcggagaataaaggattagcctttcccacagctacagctcccgactccaccactgagattgccatcactttccatgttacggccattagacaaattgactggcggcaagaggaggag

SEQ ID NO: 440 - DNA, 2559 bp, synthetic construct
  misc_feature 1..2559: note = Synthetic
  source 1..2559: mol_type = other DNA
atggattacagcacgctttacagggatctgaaccagataagcatgcccctggatcgggtagagttctcagaggtgatggtaatccacaggatgtacttgaggttatctgatctgaatgtgggggagctccccggagccgagagggtgaagcggttgtatgtgttggcagacgtggtggagctcgcaacatttgcgcatccacagttgcttaatacgcggatgccaggatcggtgacggtgatcatattgtgtcgtcttcttcagtttccaactgatgggtcgttcgctgcttggctcgagctgccgttcatggagttgcacacactcatagaacaatacaggtcagagataaaagcagcagatgacgcgaaatggggaacgtatgtacacgcggaggaagtacagctcagcccgctgtttaatgggtggccttatctggttgttgaggcacagcgctgtattataaccgcggccatgcacaatacatttaaccgccctgggtgggttcgctccattactcaatttacaactgatcagtccggtcgggtagataccacactgctcgcacgaacagaattcggccatattgatctaccactcgaaacagattccccaacggcattcagtgtttcacaccgccaaagtacgaatttgcccgtagagtacaccggtattccagtggaggtggtgaccgatcctaacatcttgatgggcatgcaaaccagcgtgcacattgcggagctagtgaaggcatgttacccgtcaccagaattagtgagcgctgtaggggagcacgtgaattggctcaacgaagtcttgctccgagttgtccagaaggaatctcagttgcaagggaccgaggcctacaacgagtgccttgcgcttttaggtcgcattcaatgtgtcatgaagatggggccgtttgtctcggtagtgccgcagctgcaatacagaatgtacggtagcctcatcaaccaaatggcccaagtagcacaaaactacgaccgagaattcaagcaattcaaattattcatcatccaaaatcaaatccttggcagctatttgctgcagcagaacagggcatttgctgagagggagctgcagatggagagctttcatgctgctgtcatttctcaaagaagggaggagttggacaatacattcgcaaagatggaccgattgagcgggcaaatggaggcagagagtagtgcaatggagcaagccaaaaaggaaatggacgaaggattgaggcagttccagaataggcaagttgcgaacgccctctttgccgttcttagcgctgtagctcagattgggcttgcattccttacggctggtgcaacggctcctggagctgtggcgtcggcggggcaagctgtgagcatagcaggtcaggcggcgcaaggtctgcgaagggtggtggaaattctagaggggctcgaggctgtgatggaggttgtggctgctgtgaaggacctcgtggattcattggaacaggtaggtcagattgtggacgcaccggtgatgccggaattgccctcagaggcggactggtccatttttgtgaacgaggtggaggccgtggcagagggcatgccaacggaagtctcggaggttccggtgtggagggccaagtgcaagaatgtggctgcactgggtagggagatgtgcatcacggcagaacagatttcccagctccagtatgacatctgggtgcaaggcttgttgcgggatatagctcaaagccacgcagaccggctggcagcgattcaacctgctaatcttaccaactatttggagatggctacccagatggatatgcggactacgaggatgctgctggggctcctcaacatattgcgcatccagaatgcggcgctcaggtacgagtatcttctaatgcccacggagctcacaacatggccactgggtatggataccgtgggtgacttgctcatcgcgcaggagaatgctgcactgataggattaatgcagctagggccctcatctgatttcacgagcaggcatgtggtgaaagacatacctgtgaacttgctgctcgatggcgaggattgggagtttgagattcctgtgcaagctggcatgtccagcttcccttccagctggtctcgcgtccgtattcggcacctggagatgcactttgtgaaggaggccagcggtattggtggtgagattatccaccagcctaccacccagactgggaccgtttacatccttctgcagggttccactatcttccatgaccgcagaagagaccaggtgttgccttttcaggccgctgctccgctcaactaccattacgcgtaccgcctcgacaccggcgactccactctcacaaacgaaccctctgaacagtttgccaacaagttcatgcagatgacacccttcacccgttggaggcttcgtctgtctgcgtccgcaaaagagaatgcaggattagcctttcccacggctacagcacttgactccactacccagattgtcatcactttccatgttacggccatcagacaaattgactggcggcacgacgaagag

SEQ ID NO: 441 - DNA, 2559 bp, synthetic construct
  misc_feature 1..2559: note = Synthetic
  source 1..2559: mol_type = other DNA
atggattacagcacgctttacagggatctgaaccagataagcatgcccctggatcgggtagagttctcagaggtgatggtaatccacaggatgtacttgaggttatctgatctgaatgtgggggagctccccggagccgagagggtgaagcggttgtatgtgttggcagacgtggtggagctcgcaacatttgcgcatccacagttgcttaatacgcggatgccaggatcggtgacggtgatcattctgtgtcgtcttcttcagtttccaactgatgggtcgttcgctgcttggctcgagctgccgttcatggagttgcacacactcatagaacaatacaggtcagagataaaagcagcagatgacgcgaaatggggaacgtatgtacacgcggaggaagtacagctcagcccgctgtttaatgggtggccttatctggttgttgaggcacagcgctgtattataaccgcggccatgcacaatacatttaaccgccctgggtgggttcgctccattactcaatttacaactgatcagtccggtcgggtagataccacactgctcgcacgaacagaattcggccatattgatctaccactcgaaacagattccccaacggcattcagtgtttcacaccgccaaagtacgaatttgcccgtagagtacaccggtattccagtggaggtggtgaccgatcctaacatcttgatgggcatgcaaaccagcgtgcacattgcggagctagtgaaggcatgttacccgtcaccagaattagtgagcgctgtaggggtgcacgtgaattggctcaacgaagtcttgctccgagttgtccagaaggaatctcagttgcaagggaccgaggcctacaacgagtgccttgcgcttttaggtcgcattcaatgtgtcatgaagatggggccgtttgtctcggtagtgccgcagctgcaatacagaatgtatggtagcctcatcagacaaatggcccaggtagcacagaactacgaccaagatttcaggcagctcaagttattcattgcccaaaaccaaatccttggcagctatttgctgcagcagaacaaggcctttgctgacagagaggtgcagatggagagctttcattcagcggtcatttctcaaagaaggcaggagttggacgacgccatcgctaagatggaccgactgagcttgcagatggaggaagaggacagagcaatggagcaagcccgaaaagaaatggaagaaggattgaagcagttccagaatgagcaagttgcaagggctgtgttcgctgttcttaaatctgtagctatgattgcgctcgcattcgtcacggctggtgcaacggctcctggggctgcagcatctgcagcgcaagctgtgaacatagccggtcaagcggcacaagctctgcgaagggtggtggaaattctagaggggctcgaggctgtgatggaggttgtggctgctgtgaaggacctcgtggattcattggaacaggtaggtcagattgtggacgcaccggtgatgccggaattgccctcagaggcggactggtccatttttgtgaacgaggtggaggccgtggcagagggcatgccaacggaagtctcggaggttccggtgtggaaggccaagtgcaagaatgtggctgcactgggtcgggagatgagcatcacggcagtacagatgtcggagctgcagtatgacatctgggtgcaaggcatgatgcgggatatggctcgaagccaggcagacaggctggccgcaattcaacccgcggaccttaccaactatttggagatggctacccagatggatatgcggactacgaggatgctgctggggctcctcaacatattgcgcatccagaatgcggcgctcaggtacgagtatcttctaatgcccacggagctcacaacatggccactgggtatggataccgtgggtgacttgctcatcgcgcaggagaatgctgcactgataggattaatgcagctagggccctcatctgatttcacgagcaggcatgtggtgaaagacatacctgtgaacttgctgctcgatggcgaggattgggagtttgagattcctgtgcaagctggcatgtccagcttcccttccagctggtctcgcgtccgtattcggcacctggagatgcactttgtgaaggaggccagcggtattggtggtgagattatccaccagcctaccacccagactgggaccgtttacatccttctgcagggttccactatcttccatgaccgcagaagagaccaggtgttgccttttcaggccgctgctccgctcaactaccattacgcgtaccgcctcgacactggagaagccactcttacgaacgagccctcggaacagtttgccaacacattcatgcagatgacaccgttcactcactggaggcttcgtctgtctgcgtccgcagcggagaataaaggattagcctttcccacagctacagctcccgactccaccactgagattgccatcactttccatgttacggccattagacaaattgactggcggcaagaggaggag

SEQ ID NO: 442 - DNA, 2559 bp, synthetic construct
  misc_feature 1..2559: note = Synthetic
  source 1..2559: mol_type = other DNA
atggattacagcacgctttacagggatctgaaccagataagcatgcccctggatcgggtagagttctcagaggtgatggtaatccacaggatgtacttgaggttatctgatctgaatgtggggcagctcgagggagccgagagggtgaagcggttgtatgtgtttgcggacgtggtggagctcgcaacatttgcgcatccacagttgcttaatacgcggatgccaggatcggtgacggtgatcattctgtgtcgtcttcttcagtttccaactgatgggtcgttcgctgcttggctcgagctgccgttcatggagttgcacacactcatagaacaatacaggtcagagataaaagcagcagatgacgcgaaatggggaacgtatgtacacgcggaggaagtacagctcagcccgctgtttaatgggtggccttatctggttgttgaggcacagcgctgtattataaccgcggccatgcacaatacatttaaccgccctgggtgggttcgctccattactcaatttacaactgatcagtccggtcgggtagataccacactgctcgcacgaacagaattcggccatattgatctaccactcgaaacagattccccaacggcattcagtgtttcacaccgccaaagtacgaatttgcccgtagagtacaccggtattccagtggaggtggtgaccgatcctaacatcttgatgggcatgcaaaccagcgtgcacattgcggagctagtgaaggcatgttacccgtcaccagaattagtgagcgctgtaggggtgcacgtgaattggctcaacgaagtcttgctccgagttgtccagaaggaatctcagttgcaagggaccgaggcctacaacgagtgccttgcgcttttaggtcgcattcaatgtgtcatgaagatggggccgtttgtctcggtagtgccgcagctgcaatacagaatgtatggtagcctcatcaaccaaatggcccaagtagcacaaaactacgaccgagaattcaagcaattcaaattattcatcatccaaaatcaaatccttggcagctatttgctgcagcagaacagggcctttgctgacagagaggtgcagatggagagctttcattcagcggtcatttctcaaagaaggcaggagttggacgacgccatcgctaagatggaccgactgagcttgcagatggaggaagaggacagagcaatggagcaagcccgaaaagaaatggaagaaggattgaagcagttccagaatgagcaagttgcaagggctgtgttcgctgttcttagcgctgtagctcagattgggcttgcattccttacggctggtgcaacggctcctggagctgtggcgtcggcggggcaagctgtgagcatagcaggtcaggcggcgcaaggtctgcgaagggtggtggaaattctagaggggctcgaggctgtgatggaggttgtggctgctataaagcaccttgtggatgctctggaccaggtaagtcagattgtggatgcaccacctatgccagacatgccctcggaggcggactggtccatttttgtgaatgagattgaagccgtggcagaggggatgccgacggaagtctcggaggttccggcgtggaaggccaagtgcaagaatgtggctgcactgggtagggagatgtgcatcacggcagaacagatttcccagctccagtatgacatctgggtgcaaggcttgttgcgggatatagctcaaagccacgcagaccggctggcagcgattcaacctgctaatcttaccaactatttggagatggcaatacagatggatatgcggactacgaggatactgatagggctcctcaacataatgcgcatccagaatgcggcacttatgtatgagtaccttctaacgcccacgcagctcactgcatggccgctgagaatggatactgtggccaacttgctcatcacgcacgagagtgctgcactgtcaggattagctcagttagggcccccatcggacttcacgagcaggcatgtagtgaaaggcatacctgtgagcttgcttctagacggtggggattgggaatttgagattcctgtgcaagctggcatgtccagcttcccttccagctggtctcgcgtccgtattcggcacctggagatgcactttgtgaaggaggccagcggtattggtggtgagattatccaccagcctgccacccagacggggaccgtttacatccttctgcagggttccactatcttccatgaccgcagaagagaccaggtgttgccttttcaggccgctgctccgctcaactaccattacgcgtaccgcctcgacaccggcgactccactctcacaaacgaaccctctgaacagtttgccaacaagttcatgcagatgacacccttcacccgttggaggcttcgtctgtctgcgtccgcaaaagagaatgcaggattagcctttcccacggctacagcacttgactccactacccagattgtcatcactttccatgttacggccatcagacaaattgactggcggcacgacgaagag

SEQ ID NO: 443 - DNA, 2556 bp, synthetic construct
  misc_feature 1..2556: note = Synthetic
  source 1..2556: mol_type = other DNA
atggattacagcacgctttacagggatctgaaccagataagcatgcccctggatcgggtagagttctcagaggtgatggtgatccacaggatgtacttgaggttatctgatctgaatgtgggggagctccccggagccgagagggtgaagcggttgtatgtgttggcagacgtggtggagctcgcaacatttgcgcatccacagttgcttaatacgcggatgccaggatcggtgacggtgatcattctgtgtcgtcttcttcagtttccaactgatgggtcgttcgctgcttggctcgagctgccgttcatggagttgcacacactcatagaacaatacaggtcagagataaccgcagcagatgacgcgaaatggggaacgtatgtacacgcggaggaagtacagctcagcccgctgtttaatgggtggccttatctggttgttgaggcacagcgctgtattataaccgcggccatgcacaatacatttaaccgccctgggtgggttcgctccattactcaatttacaactgatcagtccggtcgggtagataccacactgctcgcacgaacagaattcggccatattgatctaccactcgaaacagattccccaacggcattcagtgtttcacaccgccaaagtacgaatttgcccgtagagtacaccggtattccagtggaggtggtgaccgatcctaacatcttgatgggcatgcaaaccagcgtgcacattgcggagctagtgaaggcatgttacccgtcaccagaattagtgagcgctgtaggggagcacgtgaattggctcaacgaagtcttgctccgagttgtccagaaggaatctcagttgcaagggaccgaggcctacaacgagtgccttgcgcttttaggtcgcattcaatgtgtcatgaagatggggccgtttgtctcggtagtgccgcagctgcaatacagaatgtatggtagcctcatcagacaaatggcccaggtagcacagaactacgaccaagatttcaggcagctcaagttattcattgcccaaaaccaaatccttggcagctatttgctgcagcagaacaaggcctttgctgacagagaggtgcagatggagagctttcattcagcggtcatttctcaaagaaggcaggagttggacgacgccatcgctaagatggaccgactgagcttgcagatggaggaagaggacagagcaatggagcaagcccgaaaagaaatggaagaaggattgaagcagttccagaatgagcaagttgcaagggctgtgttcgctgttcttaaatctgtagctatgattgcgctcgcattcgtcacggctggtgcaacggctcctggggctgcagcatctgcagcgcaagctgtgaacatagccggtcaagcggcacaagctctgcgaagggtggtggaaattctagaggggctcgaggctgtgatggaggttgtggctgctataaagcaccttgtggatgctctggaccaggtaagtcagattgtggatgcaccacctatgccagacatgccctcggaggcggactggagtatttttgtgaatgagattgaagccgtggcagaggggatgccgacggaagtctcggaggttccggtgtggagggccaagtgcaagaatgtggctgcactgggtagggagatgagcatcacggcagtacagatgtcggagctgcagtatgacatctgggtgcaaggcatgatgcgggatatggctcgaagccaggcagacaggctggccgcaattcaacccgcggaccttaccaactatttggagatggctacccagatggatatgcggactacgaggatgctgctggggctcctcaacataatgcgcatccagaatgcggcacttatgtatgagtaccttctaacgcccacgcagctcactgcatggccgctgagaatggatactgtggccaacttgctcatcacgcacgagagtgctgcactgtcaggattagctcagttagggcccccatcggacttcacgagcaggcatgtagtgaaaggcatacctgtgagcttgcttctagacggtggggattgggaatttgagattcctgtgcaaggtggcatgtccagtttcccttccagctggactcgagtgcggattcggcacctggagatgcactttgtgcaggaggcgagcggtggcggcgagattatccaccagcctgccacccagacggggaccatttacatcctcctgcagggctccactgtcttccatgatcgcagaagggaggaggtgatgacctttcaggcagcggttccgctcaactaccattacgcgtaccgcctcgacactggagaagccactcttacgaacgagccctcggaacagtttgccaacacattcatgcagatgacaccgttcactcactggaggctacgtctgtctgcgtccgcagcggagaataaaggattagcctttcccacagctacagctcccgactccaccactgagattgccatcactttccatgttacggccattagacaaattgactggcggcaagaggaggag

SEQ ID NO: 444 - DNA, 2556 bp, synthetic construct; identical to SEQ ID NO: 431
  misc_feature 1..2556: note = Synthetic
  source 1..2556: mol_type = other DNA

SEQ ID NO: 445 - DNA, 2556 bp, synthetic construct
  misc_feature 1..2556: note = Synthetic
  source 1..2556: mol_type = other DNA
atggattacagcacgctttacagggatctgaaccagataagcatgcccctggatcgggtagagttctcagaggtgatggtaatccacaggatgtacttgaggttatctgatctgaatgtgggggagctccccggagccgagagggtgaagcggttgtatgtgtttgcggacgtggtggagctcgcaacatttgcgcatccacagttgcttaatacgcggatgccaggatcggtgacggtgatcattctgtgtcgtcttcttcagtttccaactgatgggtcgttcgctgcttggctcgagctgccgttcatggagttgcacacactcatagaacaatacaggtcagagataaaagcagcagatgacgcgaaatggggaacgtatgtacacgcggaggaagtacagctcagcccgctgtttaatgggtggccttatctggttgttgaggcacagcgctgtattataaccgcggccatgcacaatacatttaaccgccctgggtgggttcgctccattactcaatttacaactgatcagtccggtcgggtagataccacactgctcgcacgaacagaattcggccatattgatctaccactcgaaacagattccccaacggcattcagtgtttcacaccgccaaagtacgaatttgcccgtagagtacaccggtattccagtggaggtggtgaccgatcctaacatcttgatgggcatgcaaaccagcgtgcacattgcggagctagtgaaggcatgttacccgtcaccagaattagtgagcgctgtaggggtgcacgtgaattggctcaacgaagtcttgctccgagttgtccagaaggaatctcagttgcaagggaccgaggcctacaacgagtgccttgcgcttttaggtcgcattcaatgtgtcatgaagatggggccgtttgtctcggtagtgccgcagctgcaatacagaatgtatggtagcctcatcagacaaatggcccaggtagcacagaactacgaccaagatttcaggcagctcaagttattcattgcccaaaaccaaatccttggcagctatttgctgcagcagaacaaggcctttgctgacagagaggtgcagatggagagctttcattcagcggtcatttctcaaagaaggcaggagttggacgacgccatcgctaagatggaccgactgagcttgcagatggaggaagaggacagagcaatggagcaagcccgaaaagaaatggaagaaggattgaagcagttccagaatgagcaagttgcaagggctgtgttcgctgttcttaaatctgtagctatgattgcgctcgcattcgtcacggctggtgcaacggctcctggggctgcagcatctgcagcgcaagctgtgaacatagccggtcaagcggcacaagctctgcgaagggtggtggaaattctagaggggctcgaggctgtgatggaggttgtggctgctataaagcaccttgtggatgctctggaccaggtaagtcagattgtggatgcaccacctatgccagacatgccctcggaggcggactggagtatttttgtgaatgagattgaagccgtggcagaggggatgccgacggaagtctcggaggttccggcgtggaaggccaagtgcaagaatgtggctgcactgggtcgggagatgagcatcacggcagtacagatgtcggagctgcagtatgacatctgggtgcaaggcatgatgcgggatatggctcgaagccaggcagacaggctggccgcaattcaacccgcggaccttaccaactatttggagatggctacccagatggatatgcggactacgaggatgctgctggggctcctcaacataatgcgcatccagaatgcggcacttatgtatgagtaccttctaacgcccacgcagctcactgcatggccgctgagaatggatactgtggccaacttgctcatcacgcacgagagtgctgcactgtcaggattagctcagttagggcccccatcggacttcacgagcaggcatgtagtgaaaggcatacctgtgagcttgcttctagacggtggggattgggaatttgagattcctgtgcaaggtggcatgtccagtttcccttccagctggactcgagtgcggattcggcacctggagatgcactttgtgcaggaggcgagcggtggcggcgagattatccaccagcctgccacccagacggggaccatttacatcctcctgcagggctccactgtcttccatgatcgcagaagggaggaggtgatgacctttcaggcagcggttccgctcaactaccattacgcgtaccgcctcgacactggagaagccactcttacgaacgagccctcggaacagtttgccaacaagttcatgcagatgacacccttcacccgttggaggcttcgtctgtctgcgtccgcaaaagagaatgtaggattagcctttcccacggctacagcacttgactccaccactgagattgccatcactttccatgttacggccattagacaaattgactggcggcaagaggaggag

SEQ ID NO: 446 - DNA, 2559 bp, synthetic construct
  misc_feature 1..2559: note = Synthetic
  source 1..2559: mol_type = other DNA
atggattacagcacgctttacagggatctgaaccagataagcatgcccctggatcgggtagagttctcagaggtgatggtaatccacaggatgtacttgaggttatctgatctgaatgtgggggagctccccggagccgagagggtgaagcggttgtatgtgttggcagacgtggtggagctcgcaacatttgcgcatccacagttgcttaatacgcggatgccaggatcggtgacggtgatcattctgtgtcgtcttcttcagtttccaactgatgggtcgttcgctgcttggctcgagctgccgttcatggagttgcacacactcatagaacaatacaggtcagagataaaagcagcagatgacgcgaaatggggaacgtatgtacacgcggaggaagtacagctcagcccgctgtttaatgggtggccttatctggttgttgaggcacagcgctgtattataaccgcggccatgcacaatacatttaaccgccctgggtgggttcgctccattactcaatttacaactgatcagtccggtcgggtagataccacactgctcgcacgaacagaattcggccatattgatctaccactcgaaacagattccccaacggcattcagtgtttcacaccgccaaagtacgaatttgcccgtagagtacaccggtattccagtggaggtggtgaccgatcctaacatcttgatgggcatgcaaaccagcgtgcacattgcggagctagtgaaggcatgttacccgtcaccagaattagtgagcgctgtaggggagcacctgaactggctcaacgaagtcttgctccgagttgtccagaaggaatctcagttgcaagggaccgaggcctacaacgagtgccttgcgcttttaggtcgcattcaatgtgtcatgaagatggggccgtttgtctcggtagtgccgcagctgcaatacagaatgtatggtagcctcatcagacaaatggcccaggtagcacagaactacgaccaagatttcaggcagctcaagttattcattgcccaaaaccaaatccttggcagctatttgctgcagcagaacaaggcctttgctgacagagaggtgcagatggagagctttcattcagcggtcatttctcaaagaaggcaggagttggacgacgccatcgctaagatggaccgactgagcttgcagatggaggaagaggacagagcaatggagcaagcccgaaaagaaatggaagaaggattgaagcagttccagaatgagcaagttgcaagggctgtgttcgctgttcttaaatctgtagctatgattgcgctcgcattcgtcacggctggtgcaacggctcctggggctgcagcatctgcagcgcaagctgtgaacatagccggtcaagcggcacaagctctgcgaagggtggtggaaattctagaggggctcgaggctgtgatggaggttgtggctgctgtgaaggacctcgtggattcattggaacaggtaggtcagattgtggacgcaccggtgatgccggaattgccctcagaggcggactggtccatttttgtgaacgaggtggaggccgtggcagagggcatgccaacggaagtctcggaggttccggtgtggagggccaagtgcaagaatgtggctgcactgggtcgggagatgagcatcacggcagtacagatgtcggagctgcagtatgacatctgggtgcaaggcatgatgcgggatatggctcgaagccaggcagacaggctggccgcaattcaacccgcggaccttaccaactatttggagatggctacccagatggatatgcggactacgaggatgctgctggggctcctcaacatattgcgcatccagaatgcggcgctcaggtacgagtatcttctaatgcccacggagctcacaacatggccactgggtatggataccgtgggtgacttgctcatcgcgcaggagaatgctgcactgataggattaatgcagctagggccctcatctgatttcacgagcaggcatgtggtgaaagacatacctgtgaacttgctgctcgatggcgaggattgggagtttgagattcctgtgcaagctggcatgtccagcttcccttccagctggtctcgcgtccgtattcggcacctggagatgcactttgtgaaggaggccagcggtattggtggtgagattatccaccagcctaccacccagacggggaccatttacatcctcctgcagggctccactgtcttccatgatcgcagaagggaggaggtgatgacctttcaggcagcggttccgctcaactaccattacgcgtaccgcctcgacactggagaagccactcttacgaacgagccctcggaacagtttgccaacacattcatgcagatgacaccgttcactcactggaggctacgtctgtctgcgtccgcagcggagaataaaggattagcctttcccacagctacagctcccgactccaccactgagattgccatcactttccatgttacggccattagacaaattgactggcggcaagaggaggag

SEQ ID NO: 447 - DNA, 2556 bp, synthetic construct
  misc_feature 1..2556: note = Synthetic
  source 1..2556: mol_type = other DNA
atggattacagcacgctttacagggatctgaaccagataagcatgcccctggatcgggtagagttctcagaggtgatggtaatccacaggatgtacttgaggttatctgatctgaatgtgggggagctccccggagccgagagggtgaagcggttgtatgtgttggcagacgtggtggagctcgcaacatttgcgcatccacagttgcttaatacgcggatgccaggatcggtgacggtgatcattctgtgtcgtcttcttcagtttccaactgatgggtcgttcgctgcttggctcgagctgccgttcatggagttgcacacactcatagaacaatacaggtcagagataaaagcagcagatgacgcgaaatggggaacgtatgtacacgcggaggaagtacagctcagcccgctgtttaatgggtggccttatctggttgttgaggcacagcgctgtattataaccgcggccatgcacaatacatttaaccgccctgggtgggttcgctccattactcaatttacaactgatcagtccggtcgggtagataccacactgctcgcacgaacagaattcggccatattgatctaccactcgaaacagattccccaacggcattcagtgtttcacaccgccaaagtacgaatttgcccgtagagtacaccggtattccagtggaggtggtgaccgatcctaacatcttgatgggcatgcaaaccagcgtgcacattgcggagctagtgaaggcatgttacccgtcaccagaattagtgagcgctgtaggggtgcacgtgaattggctcaacgaagtcttgctccgagttgtccagaaggaatctcagttgcaagggaccgaggcctacaacgagtgccttgcgcttttaggtcgcattcaatgtgtcatgaagatggggccgtttgtctcggtagtgccgcagctgcaatacagaatgtatggtagcctcatcagacaaatggcccaggtagcacagaactacgaccaagatttcaggcagctcaagttattcattgcccaaaaccaaatccttggcagctatttgctgcagcagaacaaggcctttgctgacagagaggtgcagatggagagctttcattcagcggtcatttctcaaagaaggcaggagttggacgacgccatcgctaagatggaccgactgagcttgcagatggaggaagaggacagagcaatggagcaagcccgaaaagaaatggaagaaggattgaagcagttccagaataggcaagttgcgaacgccctctttgccgttcttagcgctgtagctcagattgggcttgcattccttacggctggtgcaacggctcctggggctgcagcatctgcagcgcaagctgtgaacatagccggtcaggcggcgcaaggtctgcgaagggtggtggaaattctagagcagctggaggctgtgatggaggttgtggctgctgtgaaggacctcgtggattcattggaacaggtaggtcagattgtggacgcaccggtgatgccggaattgccctcagaggcggactggtccatttttgtgaacgaggtggaggccgtggcagagggcatgccaacggaagtctcggaggttccggtgtggagggccaagtgcaagaatgtggctgcactgggtagggagatgtgcatcacggcagaacagatttcccagctccagtatgacatctgggtgcaaggcttgttgcgggatatagctcaaagccacgcagaccggctggcagcgattcaacctgctaatcttaccaactatttggagatggcaatacagatggatatgcggactacgaggatactgatagggctcctcaacataatgcgcatccagaatgcggcacttatgtatgagtaccttctaacgcccacgcagctcactgcatggccgctgagaatggatactgtggccaacttgctcatcacgcacgagagtgctgcactgtcaggattagctcagttagggcccccatcggacttcacgagcaggcatgtagtgaaaggcatacctgtgagcttgcttctagacggtggggattgggaatttgagattcctgtgcaaggtggcatgtccagtttcccttccagctggactcgagtgcggattcggcacctggagatgcactttgtgcaggaggcgagcggtggcggcgagattatccaccagcctgccacccagacggggaccatttacatcctcctgcagggctccactgtcttccatgatcgcagaagggaggaggtgatgacctttcaggcagcggttccgctcaactaccattacgcgtaccgcctcgacactggagaagccactcttacgaacgagccctcggaacagtttgccaacacattcatgcagatgacaccgttcactcactggaggctacgtctgtctgcgtccgcagcggagaataaaggattagcctttcccacagctacagctcccgactccaccactgagattgccatcactttccatgttacggccattagacaaattgactggcggcacgacgaagag

SEQ ID NO: 448 - DNA, 2559 bp, synthetic construct
  misc_feature 1..2559: note = Synthetic
  source 1..2559: mol_type = other DNA
atggattacagcacgctttacagggatctgaaccagataagcatgcccctggatcgggtagagttctcagaggtgatggtaatccacaggatgtacttgaggttatctgatctgaatgtgggggagctccccggagccgagagggtgaagcggttgtatgtgttggcagacgtggtggagctcgcaacatttgcgcatccacagttgcttaatacgcggatgccaggatcggtgacggtgatcattctgtgtcgtcttcttcagtttccaactgatgggtcgttcgctgcttggctcgagctgccgttcatggagttgcacacactcatagaacaatacaggtcagagataaaagcagcagatgacgcgaaatggggaacgtatgtacacgcggaggaagtacagctcagcccgctgtttaatgggtggccttatctggttgttgaggcacagcgctgtattataaccgcggccatgcacaatacatttaaccgccctgggtgggttcgctccattactcaatttacaactgatcagtccggtcgggtagataccacactgctcgcacgaacagaattcggccatattgatctaccactcgaaacagattccccaacggcattcagtgtttcacaccgccaaagtacgaatttgcccgtagagtacaccggtattccagtggaggtggtgaccgatcctaacatcttgatgggcatgcaaaccagcgtgcacattgcggagctagtgaaggcatgttacccgtcaccagaattagtgagcgctgtaggggtgcacgtgaattggctcaacgaagtcttgctccgagttgtccagaaggaatctcagttgcaagggaccgaggcctacaacgagtgccttgcgcttttaggtcgcattcaatgtgtcatgaagatggggccgtttgtctcggtagtgccgcagctgcaatacagaatgtatggtagcctcatcagacaaatggcccaggtagcacagaactacgaccaagatttcaggcagctcaagttattcattgcccaaaaccaaatccttggcagctatttgctgcagcagaacagggcatttgctgacagagaggtgcagatggagagctttcattcagcggtcatttctcaaagaaggcaggagttggacgacgccatcgctaagatggaccgactgagcttgcagatggaggaagaggacagagcaatggagcaagcccgaaaagaaatggaagaaggattgaagcagttccagaatgagcaagttgcaagggctgtgttcgctgttcttaaatctgtagctatgattgcgctcgcattcgtcacggctggtgcaacggctcctggggctgcagcatctgcagcgcaagctgtgagcatagcaggtcaggcggcgcaaggtctgcgaagggtggtggaaattctagagcagctggaggctgtgatggaggttgtggctgctgtgaaggacctcgtggattcattggaacaggtaggtcagattgtggacgcaccggtgatgccggaattgccctcagaggcggactggtccatttttgtgaacgaggtggaggccgtggcagagggcatgccaacggaagtctcggaggttccggtgtggagggccaagtgcaagaatgtggctgcactgggtcgggagatgagcatcacggcagtacagatgtcggagctgcagtatgacatctgggtgcaaggcttgttgcgggatatagctcaaagccacgcagaccggctggcagcgattcaacctgctaatcttaccaactatttggagatggcaatacagatggatatgcggactacgaggatactgatagggctcctcaacataatgcgcatccagaatgcggcacttatgtatgagtaccttctaacgcccacgcagctcactgcatggccgctgagaatggatactgtggccaacttgctcatcacgcacgagagtgctgcactgtcaggattagctcagttagggccctcatctgatttcacgagcaggcatgtggtgaaagacatacctgtgaacttgctgctcgatggcgaggattgggagtttgagattcctgtgcaagctggcatgtccagcttcccttccagctggtctcgcgtccgtattcggcacctggagatgcactttgtgaaggaggccagcggtattggtggtgagattatccaccagcctaccacccagactgggaccgtttacatccttctgcagggttccactatcttccatgaccgcagaagagaccaggtgttgccttttcaggccgctgctccgctcaactaccattacgcgtaccgcctcgacaccggcgactccactctcacaaacgaaccctctgaacagtttgccaacaagttcatgcagatgacacccttcacccgttggaggcttcgtctgtctgcgtccgcaaaagagaatgcaggattagcctttcccacggctacagcacttgactccactacccagattgtcatcactttccatgttacggccatcagacaaattgactggcggcacgacgaagag

SEQ ID NO: 449 - DNA, 2556 bp, synthetic construct
  misc_feature 1..2556: note = Synthetic
  source 1..2556: mol_type = other DNA
atggattacagcacgctttacagggatctgaaccagataagcatgcccctggatcgggtagagttctcagaggtgatggtaatccacaggatgtacttgaggttatctgatctgaatgtgggggagctccccggagccgagagggtgaagcggttgtatgtgttggcagacgtggtggagctcgcaacatttgcgcatccacagttgcttaatacgcggatgccaggatcggtgacggtgatcattctgtgtcgtcttcttcagtttccaactgatgggtcgttcgctgcttggctcgagctgccgttcatggagttgcacacactcatagaacaatacaggtcagagataaaagcagcagatgacgcgaaatggggaacgtatgtacacgcggaggaagtacagctcagcccgctgtttaatgggtggccttatctggttgttgaggcacagcgctgtattataaccgcggccatgcacaatacatttaaccgccctgggtgggttcgctccattactcaatttacaactgatcagtccggtcgggtagataccacactgctcgcacgaacagaattcggccatattgatctaccactcgaaacagattccccaacggcattcagtgtttcacaccgccaaagtacgaatttgcccgtagagtacaccggtattccagtggaggtggtgaccgatcctaacatcttgatgggcatgcaaaccagcgtgcacattgcggagctagtcaaggcatgttacccgtcaccagaattagtgagcgctgtaggggtgcacgtgaattggctcaacgaagtcttgctccgagttgtccagaaggaatctcagttgcaagggaccgaggcctacaacgagtgccttgcgcttttaggtcgcattcaatgtgtcatgaagatggggccgtttgtctcggtagtgccgcagctgcaatacagaatgtatggtagcctcatcagacaaatggcccaggtagcacagaactacgaccaagatttcaggcagctcaagttattcattgcccaaaaccaaatccttggcagctatttgctgcagcagaacaaggcctttgctgacagagaggtgcagatggagagctttcattcagcggtcatttctcaaagaaggcaggagttggacgacgccatcgctaagatggaccgactgagcttgcagatggaggaagaggacagagcaatggagcaagcccgaaaagaaatggaagaaggattgaagcagttccagaatgagcaagttgcaagggctgtgttcgctgttcttaaatctgtagctatgattgcgctcgcattcgtcacggctggtgcaacggctcctggggctgcagcatctgcagcgcaagctgtgaacatagcaggtcaggcggcgcaaggtctgcgaagggtggtggaaattctagagcagctggaggctgtgatggaggttgtggctgctgtgaaggacctcgtggattcattggaacaggtaggtcagattgtggacgcaccggtgatgccggaattgccctcggaggcggactggagtatttttgtgaatgagattgaagccgtggcagaggggatgccgacggaagtctcggaggttccggtgtggagggccaagtgcaagaatgtggctgcactgggtagggagatgtgcatcacggcagaacagatttcccagctccagtatgacatctgggtgcaaggcttgttgcgggatatagctcaaagccacgcagaccggctggcagcgattcaacctgctaatcttaccaactatttggagatggcaatacagatggatatgcggactacgaggatactgatagggctcctcaacataatgcgcatccagaatgcggcacttatgtatgagtaccttctaacgcccacgcagctcactgcatggccgctgagaatggatactgtggccaacttgctcatcacgcacgagagtgctgcactgtcaggattagctcagttagggcccccatcggacttcacgagcaggcatgtagtgaaaggcatacctgtgagcttgcttctagacggtggggattgggaatttgagattcctgtgcaaggtggcatgtccagtttcccttccagctggactcgagtgcggattcggcacctggagatgcactttgtgcaggaggcgagcggtggcggcgagattatccaccagcctgccacccagacggggaccatttacatcctcctgcagggctccactgtcttccatgatcgcagaagggaggaggtgatgacctttcaggcagcggttccgctcaactaccattacgcgtaccgcctcgacaccggcgactccactctcacaaacgaaccctctgaacagtttgccaacaagttcatgcagatgacaccgttcactcactggaggctacgtctgtctgcgtccgcagcggagaataaaggattagcctttcccacagctacagctcccgactccaccactgagattgccatcactttccatgttacggccattagacaaattgactggcggcaagaggaggag

SEQ ID NO: 450 - DNA, 2556 bp, synthetic construct
  misc_feature 1..2556: note = Synthetic
  source 1..2556: mol_type = other DNA
atggattacagcacgctttacagggatctgaaccagataagcatgcccctggatcgggtagagttctcagaggtgatggtaatccacaggatgtacttgaggttatctgatctgaatgtggggcagctcgagggagccgagaaagtgaagcggttgtatgtgttggcagacgtggtggagctcgcaacatttgcgcatccacagttgcttaatacgcggatgccaggatcggtgacggtgatcatattgtgtcgtcttcttcaatggccaactgatgggtcgttcgctgcttggctcgagctgccgttcatggagttgcacacactcatagaacaatacaggtcagagataaaagcagcagatgacgcgaaatggggaacgtatgtacacgcggaggaagtacagctcagcccgctgtttaatgggtggccttatctggttgttgaggcacagcgctgtattataaccgcggccatgcacaatacatttaaccgccctgggtgggttcgctccattactcaatttacaactgatcagtccggtcgggtagataccacactgctcgcacgaacagaattcggccatattgatctaccactcgaaacagattccccaacggcattcagtgtttcacaccgccaaagtacgaatttgcccgtagagtacaccggtattccagtggaggtggtgaccgatcctaacatcttgatgggcatgcaaaccagcgtgcacattgcggagctagtgaaggcatgttacccgtcaccagaattagtgagcgctgtaggggtgcacgtgaattggctcaacgaagtcttgctccgagttgtccagaaggaatctcagttgcaagggaccgaggcctacaacgagtgccttgcgcttttaggtcgcattcaatgtgtcatgaagatggtgagaattggcttagtagtgccccagctgcaatacagaatgtacggtagcctcatcaaccaaatggcccaagtagcacaaaactacgaccgagaattcaagcaattcaaattattcatcatccaaaatcaaatccttggcagctatttgctgcagcagaacagggcatttgctgacagagaggtgcagatggagagctttcattcagcggtcatttctcaaagaaggcaggagttggacgacgccatcgctaagatggaccgactgagcttgcagatggaggaagaggacagagcaatggagcaagcccgaaaagaaatggaagaaggattgaagcagttccagaatgagcaagttgcaagggctgtgttcgctgttcttaaatctgtagctatgattgcgctcgcattcgtcacggctggtgcaacggctcctggggctgcagcatctgcagcgcaagctgtgaacatagccggtcaagcggcacaagctctgcgaagggtggtggaaattctagaggggctcgaggctgtgatggaggttgtggctgctataaagcaccttgtggatgctctggaccaggtaagtcagattgtggatgcaccacctatgccagacatgccctcggaggcgggctggtccatttttgtgaacgaggtggaggccgtggcagagggcatgccaacggaagtctcggaggttccggtgtggagggccaagtgcaagaatgtggctgcactgggtcgggagatgagcatcacggcagtacagatgtcggagctgcagtatgacatctgggtgcaaggcatgatgcgggatatggctcgaagccaggcagacaggctggccgcaattcaacccgcggaccttaccaactatttggagatggctacccagatggatatgcggactacgaggatgctgctggggctcctcaacatattgcgcatccagaatgcggcacttatgtatgagtaccttctaacgcccacgcagctcactgcatggccgctgagaatggatactgtggccaacttgctcatcacgcacgagagtgctgcactgtcaggattagctcagttagggcccccatcggacttcacgagcaggcatgtagtgaaaggcatacctgtgagcttgcttctagacggtggggattgggaatttgagattcctgtgcaaggtggcatgtccagtttcccttccagctggactcgagtgcggattcggcacctggagatgcactttgtgcaggaggcgagcggtggcggcgagattatccaccagcctgccacccagacggggaccatttacatcctcctgcagggctccactgtcttccatgatcgcagaagggaggaggtgatgacctttcaggcagcggttccgctcaactaccattacgcgtaccgcctcgacactggagaagccactcttacgaacgagccctcggaacagtttgccaacacattcatgcagatgacaccgttcactcactggaggctacgtctgtctgcgtccgcagcggagaataaaggattagcctttcccacagctacagctcccgactccaccactgagattgccatcactttccatgttacggccattagacaaattgactggcggcaagaggaggag

SEQ ID NO: 451 - DNA, 2559 bp, synthetic construct
  misc_feature 1..2559: note = Synthetic
  source 1..2559: mol_type = other DNA
atggattacagcacgctttacagggatctgaaccagataagcatgcccctggatcgggtagagttctcagaggtgatggtaatccacaggatgtacttgaggttatctgatctgaatgtgggggagctccccggagccgagagggtgaagcggttgtatgtgttggcagacgtggtggagctcgcaacatttgcgcatccacagttgcttaatacgcggatgccaggatcggtgacggtgatcattctgtgtcgtcttcttcagtttccaactgatgggtcgttcgctgcttggctcgagctgccgttcatggagttgcacacactcatagaacaatacaggtcagagataaaagcagcagatgacgcgaaatggggaacgtatgtacacgcggaggaagtacagctcagcccgctgtttaatgggtggccttatctggttgttgaggcacagcgctgtattataaccgcggccatgcacaatacatttaaccgccctgggtgggttcgctccattactcaatttacaactgatcagtccggtcgggtagataccacactgctcgcacgaacagaattcggccatattgatctaccactcgaaacagattccccaacggcattcagtgtttcacaccgccaaagtacgaatttgcccgtagagtacaccggtattccagtggaggtggtgaccgatcctaacatcttgatgggcatgcaaaccagcgtgcacattgcggagctagtgaaggcatgttacccgtcaccagaattagtgagcgctgtaggggtgcacgtgaattggctcaacgaagtcttgctccgagttgtccagaaggaatctcagttgcaagggaccgaggcctacaacgagtgccttgcgcttttaggtcgcattcaatgtgtcatgaagatggggccgtttgtctcggtagtgccgcagctgcaatacagaatgtatggtagcctcatcagacaaatggcccaggtagcacagaactacgaccaagatttcaggcagctcaagttattcattgcccaaaaccaaatccttggcagctatttgctgcagcagaacaaggcctttgctgacagagaggtgcagatggagagctttcattcagcggtcatttctcaaagaagggaggagttggacaatacattcgcaaagatggaccgattgagcgggcaaatggaggcagagagtagtgcaatggagcaagccaaaaaggaaatggacgaaggattgaggcagttccagaataggcaagttgcgaacgccctctttgccgttcttagcgctgtagctcagattgggcttgcattccttacggctggtgcaacggctcctggagctgtggcgtcggcggggcaagctgtgagcatagcaggtcaggcggcgcaaggtctgcgaagggtggtggaaattctagagcagctggaggctgtgatggaggttgtggctgctgtgaaggacctcgtggattcattggaacaggtaggtcagattgtggacgcaccggtgatgccggaattgccctcagaggcggactggtccatttttgtgaacgaggtggaggccgtggcagagggcatgccaacggaagtctcggaggttccggtgtggagggccaagtgcaagaatgtggctgcactgggtcgggagatgagcatcacggcagtacagatgtcggagctgcagtatgacatctgggtgcaaggcttgttgcgggatatagctcaaagccacgcagaccggctggcagcgattcaacctgctaatcttaccaactatttggagatggcaatacagatggatatgcggactacgaggatgctgctggggctcctcaacatattgcgcatccagaatgcggcgctcaggtacgagtatcttctaatgcccacggagctcacaacatggccactgggtatggataccgtgggtgacttgctcatcgcgcaggagaatgctgcactgataggattaatgcagctagggccctcatctgatttcacgagcaggcatgtggtgaaagacatacctgtgaacttgctgctcgatggcgaggattgggagtttgagattcctgtgcaagctggcatgtccagcttcccttccagctggtctcgcgtccgtattcggcacctggagatgcactttgtgaaggaggccagcggtattggtggtgagattatccaccggcctgccacccagacggggaccatttacatcctcctgcagggctccactgtcttccatgatcgcagaagggaggaggtgatgacctttcaggcagcggttccgctcaactaccattacgcgtaccgcctcgacactggagaagccactcttacgaacgagccctcggaacagtttgccaacacattcatgcagatgacaccgttcactcactggaggctacgtctgtctgcgtccgcagcggagaataaaggattagcctttcccacagctacagctcccgactccaccactgagattgccatcactttccatgttacggccattagacaaattgactggcggcaagaggaggag

SEQ ID NO: 452 - DNA, 2595 bp, synthetic construct
  misc_feature 1..2595: note = Synthetic
  source 1..2595: mol_type = other DNA
atggattacagcacgctttacagggatctgaaccagataagcatgcccctggatcgggtagagttctcagaggtgatggtaatccacaggatgtacttgaggttatctgatctgaatgtgggggagctccccggagccgagagggtgaagcggttgtatgtgttggcagacgtggtggagctcgcaacatttgcgcatccacagttgcttaatacgcggatgccaggatcggtgacggtgatcattctgtgtcgtcttcttcaatggccaactgatgggaggcagtcggacaccgagctccacctgacattcatgaagttgcatgccatacaacgagaggaaaatcggtgggagataaccgcagcagatggcatgaactggggagtttacatacacgcagaggaagtacaggttggcgtgctgacaatgtcatggtcttcggtacttagagtttcggcacttcgctctgttataacctccggctttcgcgccgttagtgtgtttgaggtaccgggaagtgtaaggtccacccttggagctactttaaggcccgatcacgccttatatagtacaactatgcaagccacacccaacgcatcgcatattagtgcttttaaccttcgcatagtttccccgtcggcatatcgtgtttgtcctctccaaaatgacacagatacctacttaggtattccagcagacgtggcggcagttcttccagtagacgtggtgactgatcctaacatcttgctgggcatgcagacaacggtacacattgcggagctagtcaaggcatgtcatccgtcacccgatgttgtgagcgctgtaggggagcacctgaactggctcaacaaactcttactcccacttaaggaatcgactcagttgcaaggaagcgagtcgtacaaggagtgccttgcactcttgggtcgtgttcacgctgcgatgaagatggtgagaattggcttagtagtgccccagctgcaatacagaatgtacggtagcctcatcaaccaaatggcccaagtagcacaaaactacgaccgagaattcaagcaattcaaattattcatcatccaaaatcaaatccttggcagctatttgctgcagcagaacagggcatttgctgagagggagctgcagatggagagctttcatgctgctgtcatttctcaaagaagggaggagttggacaatacattcgcaaagatggaccgactgagcttgcagatggaggaagaggacagagcaatggagcaagcccgaaaagaaatggaagaaggattgaagcagttccagaatgagcaagttgcaagggctgtgttcgctgttcttaaatctgtagctatgattgcgctcgcattcgtcacggctggtgcaacggctcctggggctgcagcatctgcagcgcaagctgtgaacatagccggtcaagcggcacaagctctgcgaagggtggtggaaattctagaggggctcgaggctgtgatggaggttgtggctgctataaagcaccttgtggatgctctggaccaggtaagtcagattgtggatgcaccacctatgccagacatgccctcggaggcggactggagtatttttgtgaatgagattgaagccgtggcagaggggatgccgacggaagtctcggaggttccggcgtggaaggccaagtgcaagaatgtggctgcactgggtcgggagatgagcatcacggcagtacagatgtcggagctgcagtatgacatctgggtgcaaggcatgatgcgggatatggctcgaagccaggcagacaggctggccgcaattcaacccgcggaccttaccaactatttggagatggctacccagatggatatgcggactacgaggatgctgctggggctcctcaacatattgcgcatccagaatgcggcgctcaggtacgagtatcttctaatgcccacggagctcacaacatggccactgggtatggataccgtgggtgacttgctcatcgcgcaggagaatgctgcactgataggattaatgcagctagggccctcatctgatttcacgagcaggcatgtggtgaaagacatacctgtgaacttgctgctcgatggcgaggattgggagtttgagattcctgtgcaagctggcatgtccagcttcccttccagctggtctcgcgtccgtattcggcacctggagatgcactttgtgaaggaggccagcggtattggtggtgagattatccaccagcctaccacccagactgggaccgtttacatccttctgcagggttccactatcttccatgaccgcagaagagaccaggtgttgccttttcaggccgctgctccgctcaactaccattacgcgtaccgcctcgacaccggcgactccactctcacaaacgaaccctctgaacagtttgccaacaagttcatgcagatgacacccttcacccgttggaggcttcgtctgtctgcgtccgcaaaagagaatgcaggattagcctttcccacggctacagcacttgactccactacccagattgtcatcactttccatgttacggccatcagacaaattgactggcggcacgacgaagag

SEQ ID NO: 453 - DNA, 2598 bp, synthetic construct
  misc_feature 1..2598: note = Synthetic
  source 1..2598: mol_type = other DNA
atggctctcgtggattacggcaagcttttcgaggatctgaaccagataagcatgggtgtactggatcgggtagagttttcagaggtgatggtgatccacaggatgtatgtgaggctagctgatctgaatgtggggcagctcgagggagccgagaaagtgaagcggttgtatgtgtttgcggacgtggtggagctaccagtcgtggaatggcggtggccgccgcaaataccaggatcggtgacggtgatcatattgtgtcgtcttcttcaatggccaactgatgggaggcagtcggacaccgagctccacctgacattcatgaagttgcatgccatacaacgagaggaaaatcggtgggagataaccgcagcagatggcatgaactggggagtttacatacacgcagaggaagtacaggttggcgtgctgacaatgtcatggtcttcggtacttagagtttcggcacttcgctctgttataacctccggctttcgcgccgttagtgtgtttgaggtaccgggaagtgtaaggtccacccttggagctactttaaggcccgatcacgccttatatagtacaactatgcaagccacacccaacgcatcgcatattagtgcttttaaccttcgcatagtttccccgtcggcatatcgtgtttgtcctctccaaaatgacacagatacctacttaggtattccagcagacgtggcggcagttcttccagtagacgtggtgactgatcctaacatcttgctgggcatgcagacaacggtacacattgcggagctagtcaaggcatgtcatccgtcacccgatgttgtgagcgctgtaggggagcacctgaactggctcaacaaactcttactcccacttaaggaatcgactcagttgcaaggaagcgagtcgtacaaggagtgccttgcactcttgggtcgtgttcacgctgcgatgaagatggtgagaattggcttagtagtgccccagctgcaatacagaatgtacggtagcctcatcagacaaatggcccaggtagcacagaactacgaccaagatttcaggcagctcaagttattcattgcccaaaaccaaatccttggcagctatttgctgcagcagaacaaggcctttgctgacagagaggtgcagatggagagctttcattcagcggtcatttctcaaagaagggaggagttggacgacgccatcgctaagatggaccgactgagcttgcagatggaggaagaggacagagcaatggagcaagcccgaaaagaaatggaagaaggattgaagcagttccagaatgagcaagttgcaagggctgtgttcgctgttcttaaatctgtagctatgattgcgctcgcattcgtcacggctggtgcaacggctcctggggctgcagcatctgcagcgcaagctgtgaacatagccggtcaagcggcacaagctctgcgaagggtggtggaaattctagaggggctcgaggctgtgatggaggttgtggctgctataaagcaccttgtggatgctctggaccaggtaagtcagattgtggatgcaccgcctatgccagacatgccctcggaggcggactggagtatttttgtgaatgagattgaagccgtggcagaggggatgccgacggaagtctcggaggttccggcgtggaaggccaagtgcaagaatgtggctgcactgggtcgggagatgagcatcacggcagtacagatgtcggagctgcagtatgacatctgggtgcaaggcatgatgcgggatatggctcgaagccaggcagacaggctggccgcaattcaacccgcggaccttaccaactatttggagatggcaatacagatggatatgcggactacgaggatgctgctggggctcctcaacatattgcgcatccagaatgcggcgctcaggtacgagtatcttctaatgcccacggagctcacaacatggccactgggtatggataccgtgggtgacttgctcatcgcgcaggagaatgctgcactgataggattaatgcagctagggcccccatcggacttcacgagcaggcatgtagtgaaaggcatacctgtgagcttgcttctagacggtggggattgggaatttgagattcctgtgcaaggtggcatgtccagtttcccttccagctggactcgagtgcggattcggcacctggagatgcactttgtgcaggaggcgagcggtggcggtgagattatccaccagcctaccacccagactgggaccgtttacatccttctgcagggttccactatcttccatgaccgcagaagagaccaggtgttgccttttcaggccgctgctccgctcaactaccattacgcgtaccgcctcgacaccggcgactccactctcacaaacgaaccctctgaacagtttgccaacaagttcatgcagatgacacccttcacccgttggaggcttcgtctgtctgcgtccgcagcggagaataaaggattagcctttcccacagctacagctcccgactccaccactgagattgccatcactttccatgttacggccattagacaaattgactggcggcaagaggaggag

SEQ ID NO: 454 - DNA, 2553 bp, synthetic construct; identical to SEQ ID NO: 432
  misc_feature 1..2553: note = Synthetic
  source 1..2553: mol_type = other DNA

SEQ ID NO: 455 - DNA, 2559 bp, synthetic construct; identical to SEQ ID NO: 442
  misc_feature 1..2559: note = Synthetic
  source 1..2559: mol_type = other DNA

SEQ ID NO: 456 - DNA, 2556 bp, synthetic construct
  misc_feature 1..2556: note = Synthetic
  source 1..2556: mol_type = other DNA
atggattacagcacgctttacagggatctgaaccagataagcatgcccctggatcgggtagagttctcagaggtgatggtaatccacaggatgtacttgaggttatctgatctgaatgtgggggagctccccggagccgagagggtgaagcggttgtatgtgttggcagacgtggtggagctcgcaacatttgcgcatccacagttgcttaatacgcggatgccaggatcggtgacggtgatcattctgtgtcgtcttcttcagtttccaactgatgggtcgttcgctgcttggctcgagctgccgttcatggagttgcacacactcatagaacaatacaggtcagagataaaagcagcagatgacgcgaaatggggaacgtatgtacacgcggaggaagtacagctcagcccgctgtttaatgggtggccttatctggttgttgaggcacagcgctgtattataaccgcggccatgcacaatacatttaaccgccctgggtgggttcgctccattactcaatttacaactgatcagtccggtcgggtagataccacactgctcgcacgaacagaattcggccatattgatctaccactcgaaacagattccccaacggcattcagtgtttcacaccgccaaagtacgaatttgcccgtagagtacaccggtattccagtggaggtggtgaccgatcctaacatcttgatgggcatgcaaaccagcgtgcacattgcggagctagtgaaggcatgttacccgtcaccagaattagtgagcgctgtaggggtgcacgtgaattggctcaacgaagtcttgctccgagttgtccagaaggaatctcagttgcaagggaccgaggcctacaacgagtgccttgcgcttttaggtcgcattcaatgtgtcatgaagatggggccgtttgtctcggtagtgccgcagctgcaatacagaatgtatggtagcctcatcagacaaatggcccaggtagcacagaactacgaccaagatttcaggcagctcaagttattcattgcccaaaaccaaatccttggcagctatttgctgcagcagaacaaggcctttgctgacagagaggtgcagatggagagctttcattcagcggtcatttctcaaagaaggcaggagttggacgacgccatcgctaagatggaccgactgagcttgcagatggaggaagaggacagagcaatggagcaagcccgaaaagaaatggaagaaggattgaagcagttccagaatgagcaagttgcaagggctgtgttcgctgttcttaaatctgtagctatgattgcgctcgcattcgtcacggctggtgcaacggctcctggagctgtggcgtcggcggggcaagctgtgagcatagcaggtcaggcggcgcaaggtctgcgaagggtggtggaaattctagagcagctggaggctgtgatggaggttgtggctgctgtgaaggacctcgtggattcattggaacaggtaggtcagattgtggacgcaccggtgatgccggaattgccctcagaggcggactggtccatttttgtgaacgaggtggaggccgtggcagaggggatgccgacggaagtctcggaggttccggtgtggagggccaagtgcaagaatgtggctgcactgggtagggagatgtgcatcacggcagaacagatttcccagctccagtatgacatctgggtgcaaggcttgttgcgggatatagctcaaagccacgcagaccggctggcagcgattcaacctgctaatcttaccaactatttggagatggcaatacagatggatatgcggactacgaggatactgatagggctcctcaacataatgcgcatccagaatgcggcacttatgtatgagtaccttctaacgcccacgcagctcactgcatggccgctgagaatggatactgtggccaacttgctcatcacgcacgagagtgctgcactgtcaggattagctcagttagggcccccatcggacttcacgagcaggcatgtagtgaaaggcatacctgtgagcttgcttctagacggtggggattgggaatttgagattcctgtgcaaggtggcatgtccagtttcccttccagctggactcgagtgcggattcggcacctggagatgcactttgtgcaggaggcgagcggtggcggcgagattatccaccagcctgccacccagacggggaccgtttacatccttctgcagggttccactatcttccatgaccgcagaagagaccaggtgttgccttttcaggccgctgctccgctcaactaccattacgcgtaccgcctcgacaccggcgactccactctcacaaacgaaccctctgaacagtttgccaacaagttcatgcagatgacacccttcacccgttggaggcttcgtctgtctgcgtccgcaaaagagaatgcaggattagcctttcccacggctacagcacttgactccactacccagattgtcatcactttccatgttacggccatcagacaaattgactggcggcacgacgaagag

SEQ ID NO: 457 - DNA, 2556 bp, synthetic construct
  misc_feature 1..2556: note = Synthetic
  source 1..2556: mol_type = other DNA
atggattacagcacgctttacagggatctgaaccagataagcatgcccctggatcgggtagagttctcagaggtgatggtaatccacaggatgtatgtgaggctagctgatctgaatgtggggcagctccccggagccgagagggtgaagcggttgtatgtgttggcagacgtggtggagctcgcaacatttgcgcatccacagttgcttaatacgcggatgccaggatcggtgacggtgatcattctgtgtcgtcttcttcagtttccaactgatgggtcgttcgctgcttggctcgagctgccgttcatggagttgcacacactcatagaacaatacaggtcagagataaaagcagcagatgacgcgaaatggggaacgtatgtacacgcggaggaagtacagctcagcccgctgtttaatgggtggccttatctggttgttgaggcacagcgctgtattataaccgcggccatgcacaatacatttaaccgccctgggtgggttcgctccattactcaatttacaactgatcagtccggtcgggtagataccacactgctcgcacgaacagaattcggccatattgatctaccactcgaaacagattccccaacggcattcagtgtttcacaccgccaaagtacgaatttgcccgtagagtacaccggtattccagtggaggtggtgaccgatcctaacatcttgatgggcatgcaaaccagcgtgcacattgcggagctagtcaaggcatgtcatccgtcacccgatgttgtgagcgctgtaggggtgcacgtgaattggctcaacgaagtcttgctccgagttgtccagaaggaatctcagttgcaagggaccgaggcctacaacgagtgccttgcgcttttaggtcgcattcaatgtgtcatgaagatggggccgtttgtctcggtagtgccccagctgcaatacagaatgtacggtagcctcatcaaccaaatggcccaagtagcacaaaactacgaccgagaattcaagcaattcaaattattcatcatccaaaatcaaatccttggcagctatttgctgcagcagaacagggcatttgctgagagggagctgcagatggagagctttcatgctgctgtcatttctcaaagaagggaggagttggacaatacattcgcaaagatggaccgattgagcgggcaaatggaggcagagagtagtgcaatggagcaagccaaaaaggaaatggacgaaggattgaggcagttccagaataggcaagttgcgaacgccctctttgccgttcttagcgctgtagctcagattgggcttgcattccttacggctggtgcaacggctcctggggctgcagcatctgcagcgcaagctgtgaacatagccggtcaagcggcgcaaggtctgcgaagggtggtggaaattctagagcagctggaggctgtgatggaggttgtggctgctgtgaaggacctcgtggattcattggaacaggtaggtcagattgtggacgcaccggtgatgccggaattgccctcagaggcggactggtccatttttgtgaacgaggtggaggccgtggcagagggcatgccaacggaagtctcggaggttccggtgtggaaggccaagtgcaagaatgtggctgcactgggtcgggagatgagcatcacggcagtacagatgtcggagctgcagtatgacatctgggtgcaaggcatgatgcgggatatagctcaaagccacgcagaccggctggcagcgattcaacctgctaatcttaccaactatttggagatggcaatacagatggatatgcggactacgaggatactgatagggctcctcaacatattgcgcatccagaatgcggcgctcaggtacgagtatcttctaatgcccacggagctcacaacatggccactgggtatggatactgtggccaacttgctcatcacgcacgagagtgctgcactgtcaggattagctcagttagggcccccatcggacttcacgagcaggcatgtagtgaaaggcatacctgtgagcttgcttctagacggtggggattgggaatttgagattcctgtgcaaggtggcatgtccagtttcccttccagctggactcgagtgcggattcggcacctggagatgcactttgtgcaggaggcgagcggtggcggcgagattatccaccagcctgccacccagacggggaccatttacatcctcctgcagggctccactgtcttccatgatcgcagaagggaggaggtgatgacctttcaggcagcggttccgctcaactaccattacgcgtaccgcctcgacaccggcgactccactctcacaaacgaaccctctgaacagtttgccaacaagttcatgcagatgacacccttcacccgttggaggcttcgtctgtctgcgtccgcagcggagaataaaggattagcctttcccacagctacagctcccgactccaccactgagattgccatcactttccatgttacggccattagacaaattgactggcggcacgacgaagag

SEQ ID NO: 458 - DNA, 2556 bp, synthetic construct
  misc_feature 1..2556: note = Synthetic
  source 1..2556: mol_type = other DNA
atggattacagcacgctttacagggatctgaaccagataagcatgcccctggatcgggtagagttctcagaggtgatggtaatccacaggatgtacttgaggttatctgatctgaatgtgggggagctccccggagccgagagggtgaagcggttgtatgtgtttgtggacgtggtggagctcgcaacatttgcgcatccacagttgcttaatacgcggatgccaggatcggtgacggtgatcattctgtgtcgtcttcttcagtttccaactgatgggtcgttcgctgcttggctcgagctgccgttcatggagttgcacacactcatagaacaatacaggtcagagataaaagcagcagatgacgcgaaatggggaacgtatgtacacgcggaggaagtacagctcagcccgctgtttaatgggtggccttatctggttgttgaggcacagcgctgtattataaccgcggccatgcacaatacatttaaccgccctgggtgggttcgctccattactcaatttacaactgatcagtccggtcgggtagataccacactgctcgcacgaacagaattcggccatattgatctaccactcgaaacagattccccaacggcattcagtgtttcacaccgccaaagtacgaatttgcccgtagagtacaccggtattccagtggaggtggtgaccgatcctaacatcttgatgggcatgcaaaccagcgtgcacattgcggagctagtgaaggcatgttacccgtcaccagaattagtgagcgctgtaggggtgcacgtgaattggctcaacgaagtcttgctccgagttgtccagaaggaatctcagttgcaagggaccgaggcctacaacgagtgccttgcgcttttaggtcgcattcaatgtgtcatgaagatggggccgtttgtctcggtagtgccccagctgcaatacagaatgtacggtagcctcatcaaccaaatggcccaggtagcacagaactacgaccaagatttcaggcagctcaagttattcattgcccaaaaccaaatccttggcagctatttgctgcagcagaacaaggcctttgctgacagagaggtgcagatggagagctttcattcagcggtcatttctcaaagaaggcaggagttggacgacgccatcgctaagatggaccgactgagcttgcagatggaggcagagagtagtgcaatggagcaagccaaaaaggaaatggacgaaggattgaggcagttccagaataggcaagttgcgaacgccctctttgccgttcttagcgctgtagctcagattgggcttgcattccttacggctggtgcaacggctcctggagctgtggcgtcggcggggcaagctgtgagcatagcaggtcaggcggcgcaaggtctgcgaagggtggtggaaattctagagcagctggaggctgtgatggaggttgtggctgctgtgaaggacctcgtggattcattggaacaggtaggtcagattgtggacgcaccggtgatgccggaattgccctcagaggcggactggtccatttttgtgaacgaggtggaggccgtggcagagggcatgccaacggaagtctcggaggttccggtgtggagggccaagtgcaagaatgtggctgcactgggtcgggagatgagcatcacggcagtacagatgtcggagctgcagtatgacatctgggtgcaaggcatgatgcgggatatggctcgaagccaggcagacaggctggccgcaattcaacccgcggaccttaccaactatttggagatggctacccagatggatatgcggactacgaggatactgatagggctcctcaacataatgcgcatccagaatgcggcacttatgtatgagtaccttctaacgcccacgcagctcactgcatggccgctgagaatggatactgtggccaacttgctcatcacgcacgagagtgctgcactgtcaggattagctcagttagggcccccatcggacttcacgagcaggcatgtggtgaaagacatacctgtgaacttgctgctcgatggcgaggattgggagtttgagattcctgtgcaagctggcatgtccagcttcccttccagctggtctcgcgtccgtattcggcacctggagatgcactttgtgaaggaggccagcggtggcggcgagattatccaccagcctgccacccagacggggaccatttacatcctcctgcagggctccactgtcttccatgatcgcagaagggaggaggtgatgacctttcaggcagcggttccgctcaactaccattacgcgtaccgcctcgacactggagaagccactcttacgaacgagccctcggaacagtttgccaacacattcatgcagatgacaccgttcactcactggaggctacgtctgtctgcgtccgcagcggagaataaaggattagcctttcccacggctacagcacttgactccactacccagattgtcatcactttccatgttacggccattagacaaattgactggcggcacgaggaggag

SEQ ID NO: 459 - DNA, 2569 bp, synthetic construct
  misc_feature 1..2569: note = Synthetic
  source 1..2569: mol_type = other DNA
atggctctcgtggattacggcaagcttttcgaggatctgaaccagataagcatgcccctggatcgggtagagttctcagaggtgatggtaatccacaggatgtacttgaggttatctgatctgaatgtgggggagctccccggagccgagagggtgaagcggttgtatgtgtttgcggacgtggtggagctcgcaacatttgcgcatccacagttgcttaatacgcggatgccaggatcggtgacggtgatcattctgtgtcgtcttcttcagtttccaactgatgggtcgttcgctgcttggctcgagctgccgttcatggagttgcacacactcatagaacaatacaggtcagagataaaagcagcagatgacgcgaaatggggaacgtatgtacacgcggaggaagtacagctcagcccgctgtttaatgggtggccttatctggttgttgaggcacagcgctgtattataaccgcggccatgcacaatacatttaaccgccctgggtgggttcgctccattactcaatttacaactgatcagtccggacgggtagataccacactgctcgcacgaacagaattcggccatattgatctaccactcgaaacagattccccaacggcattcagtgtttcacaccgccaaagtacgaatttgcccgtagagtacaccggtattccagtggaggtggtgaccgatcctaacatcttgatgggcatgcaaaccagcgtgcacattgcggagctagtgaaggcatgttacccgtcaccagaattagtgagcgctgtaggggtgcacgtgaattggctcaacgaagtcttgctccgagttgtccagaaggaatctcagttgcaagggaccgaggcctacaacgagtgccttgcgcttttaggtcgcattcaatgtgtcatgaagatggggccgtttgtctcggtagtgccccagctgcaatacagaatgtacggtagcctcatcaaccaaatggcccaagtagcacaaaactacgaccgagaattcaagcaattcaaattattcatcatccaaaatcaaatccttggcagctatttgctgcagcagaacagggcatttgctgagagggagctgcagatggagagctttcatgctgctgtcatttctcaaagaagggaggagttggacaatacattcgcaaagatggaccgattgagcgggcaaatggaggcagagagtagtgcaatggagcaagccaaaaaggaaatggacgaaggattgaggcagttccagaataggcaagttgcgaacgccctctttgccgttcttagcgctgtagctcagattgggcttgcattccttacggctggtgcaacggctcctggggctgcagcatctgcagcgcaagctgtgaacatagccggtcaagcggcacaagctctgcgaagggtggtggaaattctagaggggctcgaggctgtgatggaggttgtggctgctataaagcaccttgtggatgctctggaccaggtaagtcagattgtggatgcaccacctatgccagacatgccctcggaggcggactggagtatttttgtgaatgagattgaagccgtggcagaggggatgccgacggaagtctcggaggttccggcgtggaaggccaagtgcaagaatgtggctgcactgggtagggagatgtgcatcacggcagaacagatttcccagctccagtatgacatctgggtgcaaggcttgttgcgggatatagctcaaagccacgcagaccggctggcagcgattcaacctgctaatcttaccaactatttggagatggcaatacagatggatatgcggactacgaggatactgatagggctcctcaacataatgcgcatccagaatgcggcacttatgtatgagtaccttctaacgcccacgcagctcactgcatggccgctgagaatggatactgtggccaacttgctcatcacgcacgagagtgctgcactgtcaggattagctcagttagggcccccatcggacttcacgagcaggcatgtggtgaaaggcatacctgtgagcttgcttctagacggtggggattgggaatttgagattcctgtgcaaggtggcatgtccagtttcccttccagctggactcgagtgcggattcggcacctggagatgcactttgtgcaggaggcgagcggtggcggcgagattatccaccagcctgccacccagacggggaccatttacatcctcctgcagggctccactgtcttccatgatcgcagaagggaggaggtgatgacctttcaggcagcggttccgctcaactaccattacgcgtaccgcctcgacactggagaagccactctcacaaacgaaccctctgaacagtttgccaacaagttcatgcagatgacacccttcacccgttggaggcttcgtctgtctgcgtccgcaaaagagaatgcaggattagcctttcccacggctacagcacttgactccactacccagattgtcatcactttccatgttacggccatcagacaaattgactggcggcacgacgaagagtagc

SEQ ID NO: 460 - DNA, 2556 bp, synthetic construct
  misc_feature 1..2556: note = Synthetic
  source 1..2556: mol_type = other DNA
atggattacagcacgctttacagggatctgaaccagataagcatgcccctggatcgggtagagttctcagaggtgatggtaatccacaggatgtacttgaggttatctgatctgaatgtgggggagctccccggagccgagagggtgaagcggttgtatgtgttggcagacgtggtggagctcgcaacatttgcgcatccacagttgcttaatacgcggatgccaggatcggtgacggtgatcattctgtgtcgtcttcttcagtttccaactgatgggtcgttcgctgcttggctcgagctgccgttcatggagttgcacacactcatagaacaatacaggtcagagataaaagcagcagatgacgcgaaatggggaacgtatgtacacgcggaggaagtacagctcagcccgctgtttaatgggtggccttatctggttgttgaggcacagcgctgtattataaccgcggccatgcacaatacatttaaccgccctgggtgggttcgctccattactcaatttacaactgatcagtccggtcgggtagataccacactgctcgcacgaacagaattcggccatattgatctaccactcgaaacagattccccaacggcattcagtgtttcacaccgccaaagtacgaatttgcccgtagagtacaccggtattccagtggaggtggtgaccgatcctaacatcttgatgggcatgcaaaccagcgtgcacattgcggagctagtgaaggcatgtcatccgtcaccagaattagtgagcgctgtaggggtgcacgtgaattggctcaacgaagtcttgctccgagttgtccagaaggaatctcagttgcaagggaccgaggcctacaacgagtgccttgcgcttttaggtcgcattcaatgtgtcatgaagatggggccgtttgtctcggtagtgccgcagctgcaatacagaatgtatggtagcctcatcagacaaatggcccaggtagcacagaactacgaccaagatttcaggcagctcaagttattcattgcccaaaaccaaatccttggcagctatttgctgcagcagaacaaggcctttgctgacagagaggtgcagatggagagctttcatgctgctgtcatttctcaaagaagggaggagttggacgacgccatcgctaagatggaccgactgagcttgcagatggaggaagaggacagagcaatggagcaagcccgaaaagaaatggaagaaggattgaagcagttccagaatgagcaagttgcaagggctgtgttcgctgttcttagcgctgtagctcagattgggcttgcattccttacggctggtgcaacggctcctggagctgcagcatctgcagcgcaagctgtgaacatagccggtcaagcggcacaagctctgcgaagggtggtggaaattctagaggggctcgaggctgtgatggaggttgtggctgctataaagcaccttgtggatgctctggaccaggtaagtcagattgtggatgcaccacctatgccagacatgccctcggaggcggactggagtatttttgtgaatgagattgaagccgtggcagaggggatgccgacggaagtctcggaggttccggcgtggaaggccaagtgcaagaatgtggctgcactgggtagggagatgtgcatcacggcagaacagatttcccagctccagtatgacatctgggtgcaaggcttgttgcgggatatagctcaaagccacgcagaccggctggcagcgattcaacctgctaatcttaccaactatttggagatggcaatacagatggatatgcggactacgaggatactgatagggctcctcaacataatgcgcatccagaatgcggcacttatgtatgagtaccttctaacgcccacgcagctcactgcatggccgctgagaatggatactgtggccaacttgctcatcacgcacgagagtgctgcactgtcaggattagctcagttagggcccccatcggacttcacgagcaggcatgtagtgaaaggcatacctgtgagcttgcttctagacggtggggattgggaatttgagattcctgtgcaaggtggcatgtccagtttcccttccagctggactcgagtgcggattcggcacctggagatgcactttgtgcaggaggcgagcggtggcggcgagattatccaccagcctgccacccagacggggaccatttacatcctcctgcagggctccactgtcttccatgatcgcagaagggaggaggtgatgacctttcaggcagcggttccgctcaactaccattacgcgtaccgcctcgacactggagaagccactcttacgaacgagccctcggaacagtttgccaacacattcatgcagatgacaccgttcactcactggaggcttcgtctgtccgcgtccgcaaaagagaatgcaggattagcctttcccacggctacagcacttgactccactacccagattgtcatcactttccatgttacggccatcagacaaattgactggcggcacgacgaagag

SEQ ID NO: 461 - DNA, 2556 bp, synthetic construct
  misc_feature 1..2556: note = Synthetic
  source 1..2556: mol_type = other DNA
atggattacagcacgctttacagggatctgaaccagataagcatgcccctggatcgggtagagttctcagaggtgatggtaatccacaggatgtacttgaggttatctgatctgaatgtgggggagctccccggagccgagagggtgaagcggttgtatgtgttggcagacgtggtggagctcgcagcatttgcgcatccacagttgcttaatacgcggatgccaggatcggtgacggtgatcattctgtgtcgtcttcttcagtttccaactgatgggtcgttcgctgcttggctcgagctgccgttcatggagttgcacacactcatagaacaatacaggtcagagataaaagcagcagatgacgcgaaatggggaacgtatgtacacgcggaggaagtacagctcagcccgctgtttaatgggtggccttatctggttgttgaggcacagcgctgtattataaccgcggccatgcacaatacatttaaccgccctgggtgggttcgctccattactcaatttacaactgatcagtccggtcgggtagataccacactgctcgcacgaacagaattcggccatattgatctaccactcgaaacagattccccaacggcattcagtgtttcacaccgccaaagtacgaatttgcccgtagagtacaccggtattccagtggaggtggtgaccgatcctaacatcttgatgggcatgcaaaccagcgtgcacattgcggagctagtgaaggcatgttacccgtcaccagaattagtgagcgctgtaggggtgcacgtgaattggctcaacgaagtcttgctccgagttgtccagaaggaatctcagttgcaagggaccgaggcctacaacgagtgccttgcgcttttaggtcgcattcaatgtgtcatgaagatggggccgtttgtctcggtagtgccgcagctgcaatacagaatgtatggtagcctcatcagacaaatggcccaggtagcacagaactacgaccaagatttcaggcagctcaagttattcattgcccaaaaccaaatccttggcagctatttgctgcagcagaacaaggcctttgctgacagagaggtgcagatggagagctttcattcagcggtcatttctcaaagaaggcaggagttggacaatacattcgcaaagatggaccgattgagcgggcaaatggaggcagagagtagtgcaatggagcaagccaaaaaggaaatggacgaaggattgaggcagttccagaataggcaagttgcgaacgccctctttgccgttcttagcgctgtagctcagattgggcttgcattccttacggctggtgcaacggctcctggagctgtggcgtcggcggggcaagctgtgagcatagcaggtcaggcggcgcaaggtctgcgaagggtggtggaaattctagagcagctggaggctgtgatggaggttgtggctgctgtgaaggacctcgtggattcattggaacaggtaggtcagattgtggacgcaccggtgatgccggaattgccctcagaggcggactggtccatttttgtgaacgaggtggaggccgtggcagagggcatgccaacggaagtctcggaggttccggtgtggagggccaagtgcaagaatgtggctgcactgggtcgggagatgagcatcacggcagtacagatgtcggagctccagtatgacatctgggtgcaaggcttgttgcgggatatagctcaaagccacgcagaccggctggcagcgattcaacctgctaatcttaccaactatttggagatggcaatacagatggatatgcggactacgaggatgctgctggggctcctcaacataatgcgcatccagaatgcggcacttatgtatgagtatcttctaatgcccacggagctcacaacatggccactgggtatggataccgtgggtgacttgctcatcgcgcaggagaatgctgcactgataggattaatgcagctagggccctcatctgatttcacgagcaggcatgtggtgaaagacatacctgtgaacttgctgctcgatggcgaggattgggaatttgagattcctgtgcaaggtggcatgtccagtttcccttccagctggactcgagtgcggattcggcacctggagatgcactttgtgcaggaggcgagcggtggcggtgagattatccaccagcctaccacccagactgggaccgtttacatccttctgcagggctccactgtcttccatgatcgcagaagggaggaggtgatgacctttcaggcagcggttccgctcaactaccattacgcgtaccgcctcgacactggagaagccactcttacgaacgagccctcggaacagtttgccaacacattcatgcagatgacaccgttcactcactggaggctacgtctgtctgcgtccgcagcggagaataaaggattagcctttcccacggctacagcacttgactccactacccagattgtcatcactttccatgttacggccattagacaaattgactggcggcaagaggaggag

SEQ ID NO: 462 - DNA, 2559 bp, synthetic construct
  misc_feature 1..2559: note = Synthetic
  source 1..2559: mol_type = other DNA
atggattacagcacgctttacagggatctgaaccagataagcatgcccctggatcgggtagagttctcagaggtgatggtaatccacaggatgtacttgaggttatctgatctgaatgtgggggagctccccggagccgagagggtgaagcggttgtatgtgttggcagacgtggtggagctcgcaacatttgcgcatccacagttgcttaatacgcggatgccaggatcggtgacggtgatcattctgtgtcgtcttcttcagtttccaactgatgggtcgttcgctgcttggctcgagctgccgttcatggagttgcacacactcatagaacaatacaggtcagagataaaagcagcagatgacgcgaaatggggaacgtatgtacacgcggaggaagtacagctcagcccgctgtttaatgggtggccttatctggttgttgaggcacagcgctgtattataaccgcggccatgcacaatacatttaaccgccctgggtgggttcgctccattactcaatttacaactgatcagtccggtcgggtagataccacactgctcgcacgaacagaattcggccatattgatctaccactcgaaacagattccccaacggcattcagtgtttcacaccgccaaagtacgaatttgcccgtagagtacaccggtattccagtggaggtggtgaccgatcctaacatcttgatgggcatgcaaaccagcgtgcacattgcggagctagtgaaggcatgttacccgtcacccgatgttgtgagcgctgtaggggagcacctgaactggctcaacgaagtcttgctccgagttgtccagaaggaatcgactcagttgcaaggaagcgagtcgtacaaggagtgccttgcactcttgggtcgtgttcacgctgcgatgaagatggtgagaattggcttagtagtgccccagctgcaatacagaatgtacggtagcctcatcaaccaaatggcccaagtagcacaaaactacgaccgagaattcaagcaattcaaattattcatcatccaaaatcaaatccttggcagctatttgctgcagcagaacagggcatttgctgagagggagctgcagatggagagctttcatgctgctgtcatttctcaaagaaggcaggagttggacgacgccatcgcaaagatggaccgattgagcgggcaaatggaggcagagagtagtgcaatggagcaagccaaaaaggaaatggacgaaggattgaggcagttccagaataggcaagttgcgaacgccctctttgccgttcttagcgctgtagctcagattgggcttgcattccttacggctggtgcaacggctcctggagctgtggcgtcggcggggcaagctgtgagcatagcaggtcaggcggcgcaaggtctgcgaagggtggtggaaattctagagcagctggaggctgtgatggaggttgtggctgctgtgaaggacctcgtggattcattggaacaggtaggtcagattgtggacgcaccggtgatgccggaattgccctcagaggcggactggtccatttttgtgaacgaggtggaggccgtggcagaggggatgccgacggaagtctcggaggttccggcgtggaaggccaagtgcaagaatgtggctgcactgggtagggagatgtgcatcacggcagaacagatttcccagctccagtatgacatctgggtgcaaggcttgttgcgggatatagctcaaagccacgcagaccgactggcagcgattcaacctgctaatcttaccaactatttggagatggcaatacagatggatatgcggactacgaggatactgatagggctcctcaacataatgcgcatccagaatgcggcacttatgtatgagtaccttctaacgcccacggagctcacaacatggccactgggtatggataccgtgggtgacttgctcatcgcgcaggagaatgctgcactgataggattaatgcagctagggccctcatctgatttcacgagcaggcatgtagtgaaaggcatacctgtgagcttgcttctagacggtggggattgggaatttgagattcctgtgcaaggtggcatgtccagtttcccttccagctggactcgagtgcggattcggcacctggagatgcactttgtgcaggaggcgagcggtggcggcgagattatccaccagcctgccacccagacggggaccatttacatcctcctgcagggctccactgtcttccatgatcgcagaagggaggaggtgatgacctttcaggcagcggttccgctcaactaccattacgcgtaccgcctcgacactggagaagccactcttacgaacgagccctcggaacagtttgccaacacattcatgcagatgacaccgttcactcactggaggctacgtctgtctgcgtccgcaaaagagaatgcaggattagcctttcccacggctacagcacttgactccactacccagattgtcatcactttccatgttacggccatcagacaaattgactggcggcaagaggaggag

SEQ ID NO: 463 - DNA, 2562 bp, synthetic construct
  misc_feature 1..2562: note = Synthetic
  source 1..2562: mol_type = other DNA
atggattacagcacgctttacagggatctgaaccagataagcatgggtgtactggatcgggtagagttttcagaggtgatggtaatccacaggatgtacttgaggttatctgatctgaatgtgggggagctccccggagccgagagggtgaagcggttgtatgtgttggcagacgtggtggagctcgcaacatttgcgcatccacagttgcttaatacgcggatgccaggatcggtgacggtgatcattctgtgtcgtcttcttcagtttccaactgatgggtcgttcgctgcttggctcgagctgccgttcatgaagttgcacacactcatagaacaatacaggtcagagataaaagcagcagatgacgcgaaatggggaacgtatgtacacgcggaggaagtacagctcagcccgctgtttaatgggtggccttatctggttgttgaggcacagcgctgtattataaccgcggccatgcacaatacatttaaccgccctgggtgggttcgctccattactcaatttacaactgatcagtccggtcgggtagataccacactgctcgcacgaacagaattcggccatattgatctaccactcgaaacagattccccaacggcattcagtgtttcacaccgccaaagtacgaatttgcccgtagagtacaccggtattccagtggaggtggtgaccgatcctaacatcttgatgggcatgcaaaccagcgtgcacattgcggagctagtgaaggcatgttacccgtcaccagaattagtgagcgctgtaggggtgcacgtgaattggctcaacgaagtcttgctccgagttgtccagaaggaatctcagttgcaagggaccgaggcctacaacgagtgccttgcgcttttaggtcgcattcaatgtgtcatgaagatggggccgtttgtctcggtagtgccgcagctgcaatacagaatgtatggtagcctcatcagacaaatggcccaagtagcacaaaactacgaccaagatttcaggcagctcaagttattcattgcccaaaaccaaatccttggcagctatttgctgcagcagaacaaggcctttgctgacagagaggtgcagatggagagctttcattcagcggtcatttctcaaagaaggcaggagttggacgacgccatcgctaagatggaccgactgagcttgcagatggaggaagaggacagagcaatggagcaagcccgaaaagaaatggaagaaggattgaagcagttccagaatgagcaagttgcaagggctgtgttcgctgttcttaaatctgtagctatgattgcgctcgcattcgtcacggctggtgcaacggctcctggggctgtggcgtcggcggggcaagctgtgagcatagcaggtcaggcggcgcaaggtctgcgaagggtggtggaaattctagaggggctcgaggctgtgatggaggttgtggctgctataaagcaccttgtggatgctctggaccaggtaagtcagattgtggatgcaccacctatgccagacatgccctcggaggcggactggagtatttttgtgaatgagattgaagccgtggcagaggggatgccgacggaagtctcggaggttccggtgtggagggccaagtgcaagaatgtggctgcactgggtcgggagatgagcatcacggcagtacagatgtcggagctgcagtatgacatctgggtgcaaggcatgatgcgggatatggctcgaagccaggcagacaggctggccgcaattcaacccgcggaccttaccaactatttggagatggctacccagatggatatgcggactacgaggatgctgctggggctcctcaacatattgcgcatccagaatgcggcgctcaggtacgagtatcttctaatgcccacggagctcacaacatggccactgagaatggatactgtggccaacttgctcatcacgcacgagagtgctgcactgtcaggattagctcagttagggccctcatctgatttcacgagcaggcatgtggtgaaagacatacctgtgaacttgctgctcgatggcgaggattgggagtttgagattcctgtgcaagctggcatgtccagcttcccttccagctggtctcgcgtccgtattcggcacctggagatgcactttgtgaaggaggccagcggtattggtggtgagattatccaccagcctaccacccagactgggaccgtttacatccttctgcagggctccactgtcttccatgatcgcagaagggaggaggtgatgacctttcaggcagcggttccgctcaactaccattacgcgtaccgcctcgacactggagaagccactcttacgaacgagccctcggaacagtttgccaacacattcatgcagatgacacccttcacccgttggaggcttcgtctgtctgcgtccgcaaaagagaatgcaggattagcctttcccacggctacagcacttgactccactacccagattgtcatcactttccatgttacggccatcagacaaattgactggcggcacgacgaagag

SEQ ID NO: 464 - DNA, 2560 bp, synthetic construct
  misc_feature 1..2560: note = Synthetic
  source 1..2560: mol_type = other DNA
atggattacagcacgctttacagggatctgaaccagataagcatgcccctggatcgggtagagttctcagaggtgatggtaatccacaggatgtacttgaggttatctgatctgaatgtgggggagctccccggagccgagagggtgaagcggttgtatgtgttggcagacgtggtggagctcgcaacatttgcgcatccacagttgcttaatacgcggatgccaggatcggtgacggtgatcattctgtgtcgtcttcttcagtttccaactgatgggtcgttcgctgcttggctcgagctgccgttcatggagttgcacacactcatagaacaatacaggtcagagataaaagcagcagatgacgcgaaatggggaacgtatgtacacgcggaggaagtacagctcagcccgctgtttaatgggtggccttatctggttgttgaggcacagcgctgtattataaccgcggccatgcacaatacatttaaccgccctgggtgggttcgctccattactcaatttacaactgatcagtccggtcgggtagataccacactgctcgcacgaacagaattcggccatattgatctaccactcgaaacagattccccaacggcattcagtgtttcacaccgccaaagtacgaatttgcccgtagagtacaccggtattccagtggaggtggtgactgatcctaacatcttgctgggcatgcagacaacggtacacattgcggagctagtcaaggcatgtcatccgtcacccgatgttgtgagcgctgtaggggtgcacctgaactggctcaacaaactcttactcccacttaaggaatcgactcagttgcaaggaagcgaggcctacaacgagtgccttgcgcttttaggtcgcattcaatgtgtcatgaagatggggccgtttgtctcggtagtgccgcagctgcaatacagaatgtatggtagcctcatcagacaaatggcccaggtagcacagaactacgaccaagatttcaggcagctcaagttattcattgcccaaaaccaaatccttggcagctatttgctgcagcagaacaaggcctttgctgacagagaggtgcagatggagagctttcattcagcggtcatttctcaaagaaggcaggagttggacgacgccatcgctaagatggaccgactgagcttgcagatggaggaagaggacagagcaatggagcaagcccgaaaagaaatggaagaaggattgaagcagttccagaatgagcaagttgcaagggctgtgttcgctgttcttaaatctgtagctatgattgcgctcgcattcgtcacggctggtgcaacggctcctggggctgcagcatctgcagcgcaagctgtgagcatagcaggtcaggcggcgcaaggtctgcgaagggtggtggaaattctagagcagctggaggctgtgatggaggttgtggctgctgtgaaggacctcgtggattcattggaacaggtaggtcagattgtggacgcaccggtgatgccggaattgccctcagaggcggactggtccatttttgtgaacgaggtggaggccgtggcagagggcatgccaacggaagtctcggaggttccggcgtggaaggccaagtgcaagaatgtggctgcactgggtagggagatgtgcatcacggcagaacagatttcccagctccagtatgacatctgggtgcaaggcttgttgcgggatatagctcaaagccacgcagaccggctggcagcgattcaacctgctaatcttaccaactatttggagatggcaatacagatggatatgcggactacgaggatactgatagggctcctcaacataatgcgcatccagaatgcggcacttatgtatgagtaccttctaacgcccacgcagctcactacatggccactgggtatggataccgtgggtgacttgctcatcgtgcaggagaatgctgcactgataggattaatgcagctagggcccccatcggacttcacgagcaggcatgtagtgaaaggcatacctgtgagcttgcttctagacggtggggattgggaatttgagattcctgtgcaaggtggcatgtccagtttcccttccagctggactcgagtgcggattcggcacctggagatgcactttgtgcaggaggccagcggtattggtggtgagattatccaccagcctaccacccagactgggaccgtttacatccttctgcagggctccactgtcttccatgaccgcagaagagaccaggtgttgccttttcaggccgctgctccgctcaactaccattacgcgtaccgcctcgacaccggcgactccactctcacaaacgaaccctctgaacagtttgccaacaagttcatgcagatgacacccttcacccgttggaggcttcgtctgtctgcgtccgcaaaagagaatgcaggattagcctttcccacggctacagcacttgactccactacccagattgtcatcactttccatgttacggccatcagacaaattgactggcggcacgacgaagagtagc

SEQ ID NO: 465 - DNA, 2556 bp, synthetic construct
  misc_feature 1..2556: note = Synthetic
  source 1..2556: mol_type = other DNA
atggattacagcacgctttacagggatctgaaccagataagcatgcccctggatcgggtagagttctcagaggtgatggtaatccacaggatgtacttgaggttatctgatctgaatgtgggggagctccccggagccgagagggtgaagcggttgtatgtgttggcagacgtggtggagctcgcaacatttgcgcatccacagttgcttaatacgcggatgccaggatcggtgacggtgatcattctgtgtcgtcttcttcagtttccaactgatgggtcgttcgctgcttggctcgagctgccgttcatggagttgcacacactcatagaacaatacaggtcagagataaaagcagcagatgacgcgaaatggggaacgtatgtacacgcggaggaagtacagctcagcccgctgtttaatgggtggccttatctggttgttgaggcacagcgctgtattataaccgcggccatgcacaatacatttaaccgccctgggtgggttcgctccattactcaatttacaactgatcagtccggtcgggtagataccacactgctcgcacgaacagaattcggccatattgatctaccactcgaaacagattccccaacggcattcagtgtttcacaccgccaaagtacgaatttgcccgtagagtacaccggtattccagtggaggtggtgaccgatcctaacatcttgatgggcatgcaaaccagcgtgcacattgcggagctagtgaaggcatgttacccgtcaccagaattagtaagcgctgtaggggtgcacgtgaattggctcaacgaagtcttgctccgagttgtccagaaggaatctcagttgcaagggaccgaggcctacaacgagtgccttgcgcttttaggtcgcattcaatgtgtcatgaagatggggccgtttgtctcggtagtgccgcagctgcaatacagaatgtatggtagcctcatcaaccaaatggcccaagtagcacaaaactacgaccgagaattcaagcaattcaaattattcatcatccaaaatcaaatccttggcagctatttgctgcagcagaacagggcatttgctgacagagaggtgcagatggagagctttcattcagcggtcatttctcaaagaagggaggagttggacgacgccatcgctaagatggaccgactgagcttgcagatggaggcagagagtagtgcaatggagcaagccaaaaaggaaatggaagaaggattgaagcagttccagaatgagcaagttgcaagggctgtgttcgctgttcttaaatctgtagctatgattgcgctcgcattcgtcacggctggtgcaacggctcctggggctgcagcatctgcagcgcaagctgtgagcatagcaggtcaggcggcgcaagctctgcgaagggtggtggaaattctagaggggctcgaggctgtgatggaggttgtggctgctgtgaaggacctcgtggatgctctggaccaggtaagtcagattgtggatgcaccacctatgccagacatgccctcggaggcggactggagtatttttgtgaatgagattgaagccgtggcagaggggatgccgacggaagtctcggaggttccggcgtggaaggccaagtgcaagaatgtggctgcactgggtagggagatgtgcatcacggcagaacagatttcccagctccagtatgacatctgggtgcaaggcttgttgcgggatatagctcgaagccaggcagacaggctggccgcaattcaacccgcggaccttaccaactatttggagatggctacccagatggatatgcggactacgaggatgctgctggggctcctcaacatattgcgcatccagaatgcggcgctcaggtacgagtatcttctaatgcccacggagctcacaacatggccactgggtatggataccgtgggtgacttgctcatcgcgcaggagaatgctgcactgataggattaatgcagctagggccctcatctgatttcacgagcaggcatgtggtgaaagacatacctgtgaacttgctgctcgatggcgaggattgggagtttgagattcctgtgcaagctggcatgtccagcttcccttccagctggtctcgcgtccgtattcggcacctggagatgcactttgtgcaggaggcgagcggtggcggcgagattatccaccagcctgccacccagacggggaccatttacatcctcctgcagggctccactgtcttccatgatcgcagaagggaggaggtgatgacctttcaggcagcggttccgctcaactaccattacgcgtaccgcctcgacactggagaagccactcttacgaacgagccctcggaacagtttgccaacacattcatgcagatgacaccgttcactcactggaggctacgtctgtctgcgtccgcagcggagaataaaggattagcctttcccacagctacagctcccgactccaccactgagattgccatcactttccatgttacggccattagacaaattgactggcggcaagaggaggag

SEQ ID NO: 466 - DNA, 2559 bp, synthetic construct
  misc_feature 1..2559: note = Synthetic
  source 1..2559: mol_type = other DNA
atggattacagcacgctttacagggatctgaaccagataagcatgcccctggatcgggtagagttctcagaggtgatggtaatccacaggatgtacttgaggttatctgatctgaatgtgggggagctccccggagccgagagggtgaagcggttgtatgtgttggcagacgtggtggagctcgcaacatttgcgcatccacagttgcttaatacgcggatgccaggatcggtgacggtgatcattctgtgtcgtcttcttcagtttccaactgatgggtcgttcgctgcttggctcgagctgccgttcatggagttgcacacactcatagaacaatacaggtcagagataaaagcagcagatgacgcgaaatggggaacgtatgtacacgcggaggaagtacagctcagcccgctgtttaatgggtggccttatctggttgttgaggcacagcgctgtattataaccgcggccatgcacaatacatttaaccgccctgggtgggttcgctccattactcaatttacaactgatcagtccggtcgggtagataccacactgctcgcacgaacagaattcggccatattgatctaccactcgaaacagattccccaacggcattcagtgtttcacaccgccaaagtacgaatttgcccgtagagtacaccggtattccagtggaggtggtgaccgatcctaacatcttgatgggcatgcaaaccagcgtgcacattgcggagctagtgaaggcatgttacccgtcaccagaattagtgagcgctgtaggggtgcacgtgaattggctcaacgaagtcttgctccgagttgtccagaaggaatctcagttgcaagggaccgaggcctacaacgagtgccttgcgcttttaggtcgcattcaatgtgtcatgaagatggggccgtttgtctcggtagtgccgcagctgcaatacagaatgtatggtagcctcatcagacaaatggcccaggtagcacagaactacgaccaagatttcaggcagctcaagttattcattgcccaaaaccaaatccttggcagctatttgctgcagcagaacaaggcctttgctgacagagaggtgcagatggagagctttcattcagcggtcatttctcaaagaaggcaggagttggacgacgccatcgctaagatggaccgactgagcttgcagatggaggaagaggacagagcaatggagcaagcccgaaaagaaatggaagaaggattgaagcagttccagaatgagcaagttgcaagggctgtgttcgctgttcttaaatctgtagctatgattgcgctcgcattcgtcacggctggtgcaacggctcctggggctgcagcatctgcagcgcaagctgtgaacatagccggtcaagcggcacaagctctgcgaagggtggtggaaattctagaggggctcgaggctgtgatggaggttgtggctgctgtgaaggacctcgtggattcattggaacaggtaggtcagattgtggacgcaccggtgatgccggaattgccctcagaggcggactggagtatttttgtgaatgagattgaagccgtggcagaggggatgccgacggaagtctcggaggttccggcgtggaaggccaagtgcaagaatgtggctgcactgggtagggagatgtgcatcacggcagaacagatttcccagctccagtatgacatctgggtgcaaggcttgttgcgggatatagctcaaagccacgcagaccggctggcagcgattcaacccgcggaccttaccaactatttggagatggctacccagatggatatgcggactacgaggatactgatagggctcctcaacataatgcgcatccagaatgcggcacttatgtatgagtaccttctaacgcccacgcagctcactgcatggccgctgagaatggatactgtggccaacttgctcatcacgcacgagagtgctgcactgtcaggattagctcagttagggcccccatcggacttcacgagcaggcatgtagtgaaaggcatacctgtgagcttgcttctagacggtggggattgggaatttgagattcctgtgcaaggtggcatgtccagtttcccttccagctggtctcgcgtccgtattcggcacctggagatgcactttgtgaaggaggccagcggtattggtggtgagattatccaccagcctaccacccagactgggaccgtttacatccttctgcagggttccactatcttccatgaccgcagaagagaccaggtgttgccttttcaggccgctgctccgctcaactaccattacgcgtaccgcctcgacactggagaagccactcttacgaacgagccctcggaacagtttgccaacacattcatgcagatgacaccgttcactcactggaggctacgtctgtctgcgtccgcagcggagaataaaggattagcctttcccacagctacagctcccgactccaccactgagattgccatcactttccatgttacggccattagacaaattgactggcggcaagaggaggag

SEQ ID NO: 467 - DNA, 2559 bp, synthetic construct; identical to SEQ ID NO: 462
  misc_feature 1..2559: note = Synthetic
  source 1..2559: mol_type = other DNA

SEQ ID NO: 468 - DNA, 2560 bp, synthetic construct
  misc_feature 1..2560: note = Synthetic
  source 1..2560: mol_type = other DNA
atggattacagcacgctttacagggatctgaaccagataagcatgcccctggatcgggtagagttctcagaggtgatggtgatccacaggatgtacttgaggttatctgatctgaatgtgggggagctccccggagccgagagggtgaagcggttgtatgtgttggcagacgtggtggagctcgcaacatttgcgcatccacagttgcttaatacgcggatgccaggatcggtgacggtgatcattctgtgtcgtcttcttcagtttccaactgatgggtcgttcgctgcttggctcgagctgccgttcatggagttgcacacactcatagaacaatacaggtcagagataaaagcagcagatgacgcgaaatggggaacgtatgtacacgcggaggaagtacagctcagcccgctgtttaatgggtggccttatctggttgttgaggcacagcgctgtattataaccgcggccatgcacaatacatttaaccgccctgggtgggttcgctccattactcaatttacaactgatcagtccggtcgggtagataccacactgctcgcacgaacagaattcggccatattgatctaccactcgaaacagattccccaacggcattcagtgtttcacaccgccaaagtacgaatttgcccgtagagtacaccggtattccagtggaggtggtgaccgatcctaacatcttgatgggcatgcaaaccagcgtgcacattgcggagctagtgaaggcatgttacccgtcaccagaattagtgagcgctgtaggggtgcacgtgaattggctcaacgaagtcttgctccgagttgtccagaaggaatctcagttgcaagggaccgaggcctacaacgagtgccttgcgcttttaggtcgcattcaatgtgtcatgaagatggggccgtttgtctcggtagtgccgcagctgcaatacagaatgtatggtagcctcatcagacaaatggcccaggtagcacagaactacgaccaagatttcaggcagctcaagttattcattgcccaaaaccaaatccttggcagctatttgctgcagcagaacagggcctttgctgacagagaggtgcagatggagagctttcattcagcggtcatttctcaaagaaggcaggagttggacaatacattcgcaaagatggaccgattgagcgggcaaatggaggcagagagtagtgcaatggagcaagccaaaaaggaaatggacgaaggattgaggcagttccagaataggcaagttgcgaacgccctctttgccgttcttagcgctgtagctcagattgggcttgcattccttacggctggtgcaacggctcctggagctgtggcgtcggcggggcaagctgtgagcatagcaggtcaggcggcgcaaggtctgcgaagggtggtggaaattctagaggggctcgaggctgtgatggaggttgtggctgctgtgaaggacctcgtggattcattggaacaggtaggtcagattgtggacgcaccggtgatgccggaattgccctcagaggcggactggtccatttttgtgaacgaggtggaagccgtggcagaggggatgccgacggaagtctcggaggttccggcgtggaaggccaagtgcaagaatgtggctgcactgggtagggagatgtgcatcacggcagaacagatttcccagctccagtatgacatctgggtgcaaggcttgttgcgggatatagctcaaagccacgcagaccggctggcagcgattcaacctgctaatcttaccaactatttggagatggcaatacagatggatatgcggactacgaggatactgatagggctcctcaacataatgcgcatccagaatgcggcacttatgtatgagtaccttctaacgcccacgcagctcactgcatggccgctgagaatggataccgtgggtgacttgctcatcacgcaggagaatgctgcactgataggattaatgcagctagggcccccatcggacttcacgagcaggcatgtagtgaaaggcatacctgtgagcttgcttctagacggtggggattgggaatttgagattcctgtgcaaggtggcatgtccagtttcccttccagctggactcgagtgcggattcggcacctggagatgcactttgtgcaggaggcgagcggtggcggcgagattatccaccagcctgccacccagacggggaccatttacatcctcctgcagggctccactgtcttccatgaccgcagaagggaggaggtgatgacctttcaggcagcggttccgctcaactaccattacgcgtaccgcctcgacaccggcgactccactctcacaaacgaaccctctgaacagtttgccaacaagttcatgcagatgacacccttcacccgttggaggcttcgtctgtctgcgtccgcaaaagagaatgcaggattagcctttcccacggctacagcacttgactccactacccagattgtcatcactttccatgttacggccatcagacaagttgactggcggcacgacgaagagtagc

SEQ ID NO: 469 - DNA, 2556 bp, synthetic construct
  misc_feature 1..2556: note = Synthetic
  source 1..2556: mol_type = other DNA
atggattacagcacgctttacagggatctgaaccagataagcatgcccctggatcgggtagagttctcagaggtgatggtaatccacaggatgtacttgaggttatctgatctgaatgtggggcagctcgagggagccgagagggtgaagcggttgtatgtgtttgcggacgtggtggagctcgcaacatttgcgcatccacagttgcttaatacgcggatgccaggatcggtgacggtgatcattctgtgtcgtcttcttcagtttccaactgatgggtcgttcgctgcttggctcgagctgccgttcatggagttgcacacactcatagaacaatacaggtcagagataaaagcagcagatgacgcgaaatggggaacgtatgtacacgcggaggaagtacagctcagcccgctgtttaatgggtggccttatctggttgttgaggcacagcgctgtattataaccgcggccatgcacaatacatttaaccgccctgggtgggttcgctccattactcaatttacaactgatcagtccggtcgggtagataccacactgctcgcacgaacagaattcggccatattgatctaccactcgaaacagattccccaacggcattcagtgtttcacaccgccaaagtacgaatttgcccgtagagtacaccggtattccagtggaggtggtgaccgatcctaacatcttgatgggcatgcaaaccagcgtgcacattgcggagctagtgaaggcatgttacccgtcaccagaattagtgagcgctgtaggggtgcacgtgaattggctcaacgaagtcttgctccgagttgtccagaaggaatctcagttgcaagggaccgaggcctacaacgagtgccttgcgcttttaggtcgcattcaatgtgtcatgaagatggggccgtttgtctcggtagtgccgcagctgcaatacagaatgtatggtagcctcatcagacaaatggcccaggtagcacagaactacgaccaagatttcaggcagctcaagttattcattgcccaaaaccaaatccttggcagctatttgctgcagcagaacaaggcctttgctgacagagaggtgcagatggagagctttcattcagcggtcatttctcaaagaagggaggagttggacaatacattcgcaaagatggaccgactgagcttgcagatggaggcagagagtagtgcaatggagcaagccaaaaaggaaatggacgaaggattgaggcagttccagaataggcaagttgcgaacgccctctttgctgttcttaaatctgtagctatgattgcgctcgcattcgtcacggctggtgcaacggctcctggagctgtggcgtcggcggggcaagctgtgagcatagcaggtcaggcggcgcaaggtctgcgaagggtggtggaaattctagagcagctggaggctgtgatggaggttgtggctgctgtgaaggacctcgtggattcattggaacaggtaggtcagattgtggacgcaccggtgatgccggaattgccctcagaggcggactggtccatttttgtgaacgaggtggaggccgtggcagagggcatgccaacggaagtctcggaggttccggtgtggagggccaagtgcaagaatgtggctgcactgggtcgggagatgagcatcacggcagtacagatttcccagctccagtatgacatctgtgtgcaaggcatgatgcgggatatggctcgaagccaggcagacaggctggccgcaattcaacccgcggaccttaccaactatttggagatggctacccagatggatatgcggactacgaggatactgatagggctcctcaacataatgcgcatccagaatgcggcacttatgtatgagtaccttctaacgcccacgcagctcactgcatggccgctgagaatggatactgtggccaacttgctcatcacgcacgagagtgctgcactgtcaggattagctcagttagggcccccatcggacttcacgagcaggcatgtagtgaaaggcatacctgtgagcttgcttctagacggtggggattgggaatttgagattcctgtgcaaggtggcatgtccagtttcccttccagctggactcgagtgcggattcggcacctggagatgcactttgtgcaggaggcgagcggtggcggcgagattatccaccagcctgccacccagacggggaccgtttacatccttctgcagggttccactgtcttccatgatcgcagaagggaggaggtgatgacctttcaggcagcagttccgctcaactaccattacgcgtaccgcctcgacaccggcgactccactctcacaaacgaaccctctgaacagtttgccaacaagttcatgcagatgacacccttcacccgttggaggcttcgtctgtctgcgtccgcaaaagagaatgcaggattagcctttcccacggctacagcacttgactccactacccagattgtcatcactttccatgttacggccatcagacaaattgactggcggcacgacgaagag

SEQ ID NO: 470 - DNA, 2559 bp, synthetic construct
  misc_feature 1..2559: note = Synthetic
  source 1..2559: mol_type = other DNA
atggattacagcacgctttacagggatctgaaccagataagcatgcccctggatcgggtagagttctcagaggtgatggtaatccacaggatgtacttgaggttatctgatctgaatgtgggggagctccccggagccgagagggtgaagcggttgtatgtgttggcagacgtggtggagctcgcaacatttgcgcatccacagttgcttaatacgcggatgccaggatcggtgacggtgatcattctgtgtcgtcttcttcagtttccaactgatgggtcgttcgctgcttggctcgagctgccgttcatggagttgcacacactcatagaacaatacaggtcagagataaaagcagcagatgacgcgaaatggggaacgtatgtacacgcggaggaagtacagctcagcccgctgtttaatgggtggccttatctggttgttgaggcacagcgctgtattataaccgcggccatgcacaatacatttaaccgccctgggtgggttcgctccattactcaatttacaactgatcagtccggtcgggtagataccacactgctcgcacgaacagaattcggccatattgatctaccactcgaaacagattccccaacggcattcagtgtttcacaccgccaaagtacgaatttgcccgtagagtacaccggtattccagtggaggtggtgaccgatcctaacatcttgatgggcatgcaaaccagcgtgcacattgcggagctagtgaaggcatgttacccgtcaccagaattagtgagcgctgtaggggtgcacgtgaattggctcaacgaagtcttgctccgagttgtccagaaggaatctcagttgcaagggaccgaggcctacaacgagtgccttgcgcttttaggtcgcattcaatgtgtcatgaagatggggccgtttgtctcggtagtgccgcagctgcaatacagaatgtatggtagcctcatcagacaaatggcccaggtagcacagaactacgaccaagatttcaggcagctcaagttattcattgcccaaaaccaaatccttggcagctatttgctgcagcagaacaaggcctttgctgacagagaggtgcagatggagagctttcattcagcggtcatttctcaaagaaggcaggagttggacgacgccatcgctaagatggaccgactgagcttgcagatggaggaagaggacagagcaatggagcaagccaaaaaggaaatggacgaaggattgaagcagttccagaatgagcaagttgcaagggctgtgttcgctgttcttaaatctgtagctatgattgcgctcgcattcgtcacggctggtgcaacggctcctggggctgtggcgtcggcggggcaagctgtgagcatagcaggtcaggcggcgcaaggtctgcgaagggtggtggaaattctagaggggctcgaggctgtgatggaggttgtggctgctataaagcaccttgtggatgctctggaccaggtaagtcagattgtggatgcaccacctatgccagacatgccctcggaggcggactggtccatttttgtgaacgaggtggaggccgtggcagagggcatgccaacggaagtctcggaggttccggtgtggagggccaagtgcaagaatgtggctgcactgggtcgggagatgagcatcacggcagtacagatgtcggagctgcagtatgacatctgggtgcaaggcatgatgcgggatatggctcgaagccagacagacaggctggccgcaattcaacccgcggaccttaccaactatttggagatggctacccagatggatatgcggactacgaggatgctgctggggctcctcaacatattgcgcatccagaatgcggcgctcaggtacgagtatcttctaatgcccacggagctcacaacatggccactgggtatggataccgtgggtgacttgctcatcgcgcaggagaatgctgcactgataggattaatgcagctagggccctcatctgatttcacgagcaggcatgtggtgaaagacatacctgtgaacttgctgctcgatggcgaggattgggagtttgagattcctgtgcaagctggcatgtccagcttcccttccagctggtctcgcgtccgtattcggcacctggagatgcactttgtgaaggaggccagcggtattggtggtgagattatccaccagcctaccacccagactgggaccgtttacatccttctgcagggttccactatcttccatgaccgcagaagagaccaggtgttgccttttcaggccgctgctccgctcaactaccattacgcgtaccgcctcgacaccggcgactccactctcacaaacgaaccctctgaacagtttgccaacaagttcatgcagatgacacccttcacccgttggaggcttcgtctgtctgcgtccgcaaaagagaatgcaggattagcctttcccacggctacagcacttgactccactacccagattgtcatcactttccatgttacggccatcagacaaattgactggcggcacgacgaagag

SEQ ID NO: 471 - DNA, 2559 bp, synthetic construct
  misc_feature 1..2559: note = Synthetic
  source 1..2559: mol_type = other DNA
atggattacagcacgctttacagggatctgaaccagataagcatgcccctggatcgggtagagttctcagaggtgatggtaatccacaggatgtacttgaggttatctgatctgaatgtgggggagctccccggagccgagagggtgaagcggttgtatgtgttggcagacgtggtggagctcgcaacatttgcgcatccacagttgcttaatacgcggatgccaggatcggtgacggtgatcattctgtgtcgtcttcttcagtttccaactgatgggtcgttcgctgcttggctcgagctgccgttcatggagttgcacacactcatagaacaatacaggtcagagataaaagcagcagatgacgcgaaatggggaacgtatgtacacgcggaggaagtacagctcagcccgctgtttaatgggtggccttatctggttgttgaggcacagcgctgtattataaccgcggccatgcacaatacatttaaccgccctgggtgggttcgctccattactcaatttacaactgatcagtccggtcgggtagataccacactgctcgcacgaacagaattcggccatattgatctaccactcgaaacagattccccaacggcattcagtgtttcacaccgccaaagtacgaatttgcccgtagagtacaccggtattccagtggaggtggtgaccgatcctaacatcttgatgggcatgcaaaccagcgtgcacattgcggagctagtgaaggcatgttacccgtcaccagaattagtgagcgctgtaggggtgcacgtgaattggctcaacgaagtcttgctccgagttgtccagaaggaatctcagttgcaagggaccgaggcctacaacgagtgccttgcgcttttaggtcgcattcaatgtgtcatgaagatggggccgtttgtctcggtagtgccgcagctgcaatacagaatgtatggtagcctcatcagacaaatggcccaggtagcacagaactacgaccaagaattcaagcaattcaaattattcatcatccaaaatcaaatccttggcagctatttgctgcagcagaacagggcatttgctgagagggagctacagatggagagctttcatgctgctgtcatttctcaaagaagggaggagttggacaatacattcgcaaagatggaccgattgagcgggcaaatggaggcagagagtagtgcaatggagcaagccaaaaaggaaatggacgaaggattgaggcagttccagaataggcaagttgcgaacgccctctttgccgttcttagcgctgtagctcagattgggctcgcattcgtcacggctggtgcaacggctcctggagctgtggcgtcggcggggcaagctgtgagcatagcaggtcaggcggcgcaaggtctgcgaagggtggtggaaattctagagcagctggaggctgtgatggaggttgtggctgctataaagcaccttgtggatgctctggaccaggtaagtcagattgtggatgcaccacctatgccagacatgccctcggaggcggactggagtatttttgtgaatgagattgaagccgtggcagagggcatgccaacggaagtctcggaggttccggtgtggaaggccaagtgcaagaatgtggctgcactgggtagggagatgtgcatcacggcagtacagatgtcggagctgcagtatgacatctgggtgcaaggcttgttgcgggatatagctcaaagccacgcagaccggctggcagcgattcaacctgctaatcttaccaactatttggagatggcaatacagatggatatgcggactacgaggatactgatagggctcctcaacataatgcgcatccagaatgcggcacttatgtatgagtaccttctaacgcccacgcagctcactgcatggccgctgagaatggatactgtggccaacttgctcatcacgcacgagagtgctgcactgtcaggattagctcagttagggccctcatctgatttcacgagcaggcatgtggtgaaagacatacctgtgaacttgctgctcgatggcgaggattgggagtttgagattcctgtgcaagctggcatgtccagcttcccttccagctggtctcgcgtccgtattcggcacctggagatgcactttgtgaaggaggccagcggtattggtggtgagattatccaccagcctaccacccagactgggaccgtttacatccttctgcagggttccactatcttccatgaccgcagaagagaccaggtgttgccttttcaggccgctgctccgctcaactaccattacgcgtaccgcctcgacactggagaagccactcttacgaacgagccctcggaacagtttgccaacacattcatgcagatgacaccgttcactcactggaggctacgtctgtctgcgtccgcagcggagaataaaggattagcctttcccacggctacagcacttgactccactacccagattgtcatcactttccatgttacggccatcagacaaattgactggcggcaagaggaggag

SEQ ID NO: 472 - DNA, 2556 bp, synthetic construct
  misc_feature 1..2556: note = Synthetic
  source 1..2556: mol_type = other DNA
atggattacagcacgctttacagggatctgaaccagataagcatgcccctggatcgggtagagttctcagaggtgatggtaatccacaggatgtacttgaggttatctgatctgaatgtggggcagctcgagggagccgagaaagtgaagcggttgtatgtgttggcagacgtggtggagctcgcaacatttgcgcatccacagttgcttaatacgcggatgccaggatcggtgacggtgatcattctgtgtcgtcttcttcagtttccaactgatgggtcgttcgctgcttggctcgagctgccgttcatggagttgcacacactcatagaacaatacaggtcagagataaaagcagcagatgacgcgaaatggggaacgtatgtacacgcggaggaagtacagctcagcccgctgtttaatgggtggccttatctggttgttgaggcacagcgctgtattataaccgcggccatgcacaatacatttaaccgccctgggtgggttcgctccattactcaatttacaactgatcagtccggtcgggtagataccacactgctcgcacgaacagaattcggccatattgatctaccactcgaaacagattccccaacggcattcagtgtttcacaccgccaaagtacgaatttgcccgtagagtacaccggtattccagtggaggtggtgaccgatcctaacatcttgatgggcatgcaaaccagcgtacacattgcggagctagtgaaggcatgttacccgtcaccagaattagtgagcgctgtaggggtgcacgtgaattggctcaacgaagtcttgctccgagttgtccagaaggaatctcagttgcaagggaccgaggcctacaacgagtgccttgcgcttttaggtcgcattcaatgtgtcatgaagatggggccgtttgtctcggtagtgccgcagctgcaatacagaatgtatggtagcctcatcagacaaatggcccaggtagcacagaactacgaccaagatttcaggcagctcaagttattcattgcccaaaaccaaatccttggcagctatttgctgcagcagaacaaggcctttgctgacagagaggtgcagatggagagctttcattcagcggtcatttctcaaagaagggaggagttggacgacgccatcgctaagatggaccgactgagcttgcagatggaggaagaggacagagcaatggagcaagcccgaaaagaaatggaagaaggattgaagcagttccagaatgagcaagttgcaagggctgtgttcgctgttcttaaatctgtagctatgattgcgctcgcattcgtcacggctggtgcaacggctcctggggctgcagcatctgcagcgcaagctgtgaacatagccggtcaagcggcacaagctctgcgaagggtggtggaaattctagagcagctggaggctgtgatggaggttgtggctgctgtgaaggacctcgtggattcattggaacaggtaggtcagattgtggacgcaccggtgatgccggaattgccctcagaggcggactggtccatttttgtgaacgaggtggaggccgtggcagaggggatgccgacggaagtctcggaggttccggcgtggaaggccaagtgcaagaatgtggctgcactgggtcgggagatgagcatcacggcagaacagatttcccagctccagtatgacatctgggtgcaaggcttgttgcgggatatggctcgaagccaggcagacaggctggccgcaattcaacccgcggaccttaccaactatttggagatggctacccagatggatatgcggactacgaggatgctgctggggctcctcaacatattgcgcatccagaatgcggcgctcaggtacgagtatcttctaatgcccacggagctcacaacatggccactgggtatggataccgtgggtgacttgctcatcgcgcaggagaatgctgcactgataggattaatgcagctagggccctcatctgatttcacgagcaggcatgtggtgaaagacatacctgtgagcttgcttctagacggtggggattgggaatttgagattcctgtgcaaggtggcatgtccagtttcccttccagctggactcgagtgcggattcggcacctggagatgcactttgtgcaggaggcgagcggtggcggcgagattatccaccagcctgccacccagacggggaccatttacatcctcctgcagggctccactgtcttccatgatcgcagaagggaggaggtgatgacctttcaggcagcggttccgctcaactaccattacgcgtaccgcctcgacactggagaagccactcttacgaacgagccctcggaacagtttgccaacaagttcatgcagatgacacccttcacccgttggaggcttcgtctgtctgcgtccgcagcggagaataaaggattagcctttcccacagctacagctcccgactccaccactgagattgccatcactttccatgttacggccattagacaaattgactggcggcaagaggaggag

SEQ ID NO: 473 - DNA, 2605 bp, synthetic construct
  misc_feature 1..2605: note = Synthetic
  source 1..2605: mol_type = other DNA
atggctctcgtggattacggcaagcttttcgaggatctgaaccagataagcatgggtgtactggatcgggtagagttttcagaggtgatggtgatccacaggatgtatgtgaggctagctgatctgaatgtggggcagctcgagggagccgagaaagtgaagcggttgtatgtgtttgcggacgtggtggagctaccagtcgtggaatggcggtggccgccgcaaataccaggatcggtgacggtgatcatattgtgtcgtcttcttcaatggccaactgatgggaggcagtcggacaccgagctccacctgacattcatgaagttgcatgccatacaacgagaggaaaatcggtgggagataaccgcagcagatggcatgaactggggagtttacatacacgcagaggaagtacaggttggcgtgctgacaatgtcatggtcttcggtacttagagtttcggcacttcgctctgttataacctccggctttcgcgccgttagtgtgtttgaggtaccgggaagtgtaaggtccacccttggagctactttaaggcccgatcacgccttatatagtacaactatgcaagccacacccaacgcatcgcatattagtgcttttaaccttcgcatagtttccccgtcggcatatcgtgtttgtcctctccaaaatgacacagatacctacttaggtattccagcagacgtggcggcagttcttccagtagacgtggtgactgatcctaacatcttgctgggcatgcagacaacggtacacattgcggagctagtcaaggcatgtcatccgtcacccgatgttgtgagcgctgtaggggagcacctgaactggctcaacaaactcttactcccacttaaggaatcgactcagttgcaaggaagcgagtcgtacaaggagtgccttgcactcttgggtcgtgttcacgctgcgatgaagatggtgagaattggcttagtagtgccccagctgcaatacagaatgtacggtagcctcatcaaccaaatggcccaagtagcacaaaactacgaccgagaattcaagcaattcaaattattcatcatccaaaatcaaatccttggcagctatttgctgcagcagaacagggcatttgctgagagggagctgcagatggagagctttcatgctgctgtcatttctcaaagaaggcaggagttggacgacgccatcgctaagatggaccgactgagcgggcaaatggaggcagagagtagtgcaatggagcaagccaaaaaggaaatggacgaaggattgaggcagttccagaataggcaagttgcgaacgccctctttgccgttcttagcgctgtagctcagattgggcttgcattccttacggctggtgcaacggctcctggagctgtggcgtcggcggggcaagctgtgagcatagcaggtcaggcggcgcaaggtctgcgaagggtggtggaaattctagaggggctcgaggctgtgatggaggttgtggctgctgtgaaggacctcgtggattcattggaacaggtaggtcagattgtggacgcaccggtgatgccggaattgccctcagaggcggactggtccatttttgtgaacgaggtggaggccgtggcagagggcatgccaacggaagtctcggaggttccggtgtggagggccaagtgcaagaatgtggctgcactgggtcgggagatgagcatcacggcagtacagatttcccagctccagtatgacatctgggtgcaaggcatgatgcgggatatggctcgaagtcaggcagacaggctggccgcaattcaacccgcggaccttaccaactatttggagatggctacccagatggatatgcggactacgaggatgctgctggggctcctcaacatattgcgcatccagaatgcggcgctcaggtacgagtatcttctaatgcccacggagctcacaacatggccactgggtatggataccgtgggtgacttgctcatcgcgcaggagaatgctgcactgataggattaatgcagctagggccctcatctgatttcacgagcaggcatgtagtgaaaggcatacctgtgagcttgcttctagacggtggggattgggagtttgagattcctgtgcaagctggcatgtccagcttcccttccagctggtctcgcgtccggattcggcacctggagatgcactttgtgcaggaggccagcggtattggtggtgagattatccaccagcctgccacccagacggggaccgtttacatccttctgcagggttccactatcttccatgaccgcagaagagaccaggtgttgccttttcaggccgctgctccgctcaactaccattacgcgtaccgcctcgacaccggcgactccactctcacaaacgaaccctctgaacagtttgccaacaagttcatgcagatgacacccttcacccgttggaggcttcgtctgtctgcgtccgcaaaagagaatgcaggattagcctttcccacggctacagcacttgactccactacccagattgtcatcactttccatgttacggccattagacaaattgactggcggcacgatgaagagtagc

SEQ ID NO: 474 - DNA, 2605 bp, synthetic construct
  misc_feature 1..2605: note = Synthetic
  source 1..2605: mol_type = other DNA
atggctctcgtggattacggcaagcttttcgaggatctgaaccagataagcatgggtgtactggatcgggtagagttttcagaggtgatggtgatccacaggatgtatgtgaggctagctgatctgaatgtggggcagctcgagggagccgagaaagtgaagcggttgtatgtgtttgcggacgtggtggagctaccagtcgtggaatggcggtggccgccgcaaataccaggatcggtgacggtgatcatattgtgtcgtcttcttcaatggccaactgatgggaggcagtcggacaccgagctccacctgacattcatgaagttgcatgccatacaacgagaggaaaatcggtgggagataaccgcagcagatggcatgaactggggagtttacatacacgcagaggaagtacaggttggcgtgctgacaatgtcatggtcttcggtacttagagtttcggcacttcgctctgttataacctccggctttcgcgccgttagtgtgtttgaggtaccgggaagtgtaaggtccacccttggagctactttaaggcccgatcacgccttatatagtacaactatgcaagccacacccaacgcatcgcatattagtgcttttaaccttcgcatagtttccccgtcggcatatcgtgtttgtcctctccaaaatgacacagatacctacttaggtattccagcagacgtggcggcagttcttccagtagacgtggtgactgatcctaacatcttgctgggcatgcagacaacggtacacattgcggagctagtcaaggcatgtcatccgtcacccgatgttgtgagcgctgtaggggagcacctgaactggctcaacaaactcttactcccacttaaggaatcgactcagttgcaaggaagcgagtcgtacaaggagtgccttgcactcttgggtcgtgttcacgctgcgatgaagatggtgagaattggcttagtagtgccccagctgcaatacagaatgtacggtagcctcatcaaccaaatggcccaagtagcacaaaactacgaccgagaattcaagcaattcaaattattcatcatccaaaatcaaatccttggcagctatttgctgcagcagaacagggcatttgctgagagggagctgcagatggagagctttcatgctgctgtcatttctcaaagaagggaggagttggacaatacattcgcaaagatggaccgactgagcttgcagatggaggaagaggacagagcaatggagcaagccaaaaaggaaatggacgaaggattgaggcagttccagaataggcaagttgcgaacgccctctttgccgttcttagcgctgtagctcagattgggcttgcattccttacggctggtgcaacggctcctggagctgtggcgtcggcggggcaagctgtgagcatagcaggtcaggcggcgcaaggtctgcgaagggtggtggaaattctagaggggctcgaggctgtgatggaggttgtggctgctataaagcaccttgtggattcattggaacaggtaggtcagattgtggacgcaccggtgatgccggaattgccctcagaggcggactggtccatttttgtgaacgaggtggaggccgtggcagagggcatgccaacggaagtctcggaggttccggtgtggaaggccaagtgcaagaatgtggctgcactgggtagggagatgagcatcacggcagtacagatgtcggagctgcagtatgacatctgggtgcaaggcatgatgcgggatatggctcgaagccaggcagacaggctggccgcaattcaacccgcggaccttaccaactatttggagatggctacccagatggatatgcggactacgaggatgctgctggggctcctcaacatattgcgcatccagaatgcggcgctcaggtacgagtatcttctaatgcccacggagctcacaacatggccactgggtatggataccgtgggtgacttgctcatcgcgcaggagaatgctgcactgataggattaatgcagctagggccctcatctgatttcacgagcaggcatgtggtgaaagacatacctgtgaacttgctgctcgatggcgaggattgggagtttgagattcctgtgcaaggtggcatgtccagtttcccttccagctggactcgagtgcggattcggcacctggagatgcactttgtgaaggaggccagcggtattggtggtgagattatccaccagcctgccacccagaccgggaccgtttacatccttctgcagggttccactatcttccatgatcgcagaagggaggaggtgttgccttttcaggccgctgctccgctcaactaccattacgcgtaccgcctcgacactggagaagccactcttacgaacgagccctcggaacagtttgccaacacattcatgcagatgacacccttcacccgttggaggctacgtctgtctgcgtccgcagcggagaataaaggattagcctttcccacagctacagctcccgactccaccactgagattgccatcactttccatgttacggccatcagacaaattgactggcggcaagaggaggagtagc

SEQ ID NO: 475 - DNA, 2602 bp, synthetic construct
  misc_feature 1..2602: note = Synthetic
  source 1..2602: mol_type = other DNA
atggctctcgtggattacggcaagcttttcgaggatctgaaccagataagcatgggtgtactggatcgggtagagttttcagaggtgatggtgatccacaggatgtatgtgaggctagctgatctgaatgtggggcagctcgagggagccgagaaagtgaagcggttgtatgtgtttgcggacgtggtggagctaccagtcgtggaatggcggtggccgccgcaaataccaggatcggtgacggtgatcatattgtgtcgtcttcttcaatggccaactgatgggaggcagtcggacaccgagctccacctgacattcatgaagttgcatgccatacaacgagaggaaaatcggtgggagataaccgcagcagatggcatgaactggggagtttacatacacgcagaggaagtacaggttggcgtgctgacaatgtcatggtcttcggtacttagagtttcggcacttcgctctgttataacctccggctttcgcgccgttagtgtgtttgaggtaccgggaagtgtaaggtccacccttggagctactttaaggcccgatcacgccttatatagtacaactatgcaagccacacccaacgcatcgcatattagtgcttttaaccttcgcatagtttccccgtcggcatatcgtgtttgtcctctccaaaatgacacagatacctacttaggtattccagcagacgtggcggcagttcttccagtagacgtggtgactgatcctaacatcttgctgggcatgcagacaacggtacacattgcggagctagtcaaggcatgtcatccgtcacccgatgttgtgagcgctgtaggggagcacctgaactggctcaacaaactcttactcccacttaaggaatcgactcagttgcaaggaagcgagtcgtacaaggagtgccttgcactcttgggtcgtgttcacgctgcgatgaagatggtgagaattggcttagtagtgccccagctgcaatacagaatgtacggtagcctcatcaaccaaatggcccaagtagcacaaaactacgaccgagaattcaagcaattcaaattattcatcatccaaaatcaaatccttggcagctatttgctgcagcagaacagggcatttgctgagagggagctgcagatggagagctttcattcagcggtcatttctcaaagaagggaggagttggacaatacattcgcaaagatggaccgactgagcttgcagatggaggaagaggacagagcaatggagcaagccaaaaaggaaatggacgaaggattgaggcagttccagaataggcaagttgcgaacgccctctttgccgttcttagcgctgtagctcagattgggcttgcattccttacggctggtgcaacggctcctggggctgtggcgtcggcggggcaagctgtgagcatagcaggtcaggcggcgcaaggtctgcgaagggtggtggaaattctagagcagctggaggctgtgatggaggttgtggctgctgtgaaggacctcgtggattcattggaacaggtaggtcagattgtggacgcaccggtgatgccggaattgccctcagaggcggactggtccatttttgtgaacgaggtggaggccgtggcagaggggatgccgacggaagtctcggaggttccggcgtggaaggccaagtgcaagaatgtggctgcactgggtagggagatgtgcatcacggcagaacagatttcccagctccagtatgacatctgggtgcaaggcatgatgcgggatatggctcgaagccaggcagacaggctggccgcaattcaacccgcggaccttaccaactatttggagatggctacccagatggatatgcggactacgaggatgctgctggggctcctcaacatattgcgcatccagaatgcggcgctcaggtacgagtatcttctaatgcccacggagctcacaacatggccactgggtatggataccgtgggtgacttgctcatcgcgcacgagagtgctgcactgtcaggattagctcagttagggcccccatcggacttcacgagcaggcatgtagtgaaaggcatacctgtgagcttgcttctagacggtggggattgggaatttgagattcctgtgcaaggtggcatgtccagtttcccttccagctggactcgagtgcggattcggcacctggagatgcactttgtgcaggaggcgagcggtggcggcgagattatccaccagcctgccacccagacggggaccatttacatcctcctgcagggctccactgtcttccatgatcgcagaagggaggaggtgatgacctttcaggcagcggttccgctcaactaccattacgcgtaccgcctcgacactggagaagccactcttacgaacgagccctcggaacagtttgccaacacattcatgcagatgacaccgttcactcactggaggcttcgtctgtctgcgtccgcagcggagaataaaggattagcctttcccacagctacagctcccgactccaccactgagattgccatcactttccatgttacggccattagacaaattgactggcggcacgacgaagagtagc

SEQ ID NO: 476 - DNA, 2605 bp, synthetic construct
  misc_feature 1..2605: note = Synthetic
  source 1..2605: mol_type = other DNA
atggctctcgtggattacggcaagcttttcgaggatctgaaccagataagcatgggtgtactggatcgggtagagttttcagaggtgatggtgatccacaggatgtatgtgaggctagctgatctgaatgtggggcagctcgagggagccgagaaagtgaagcggttgtatgtgtttgcggacgtggtggagctaccagtcgtggaatggcggtggccgccgcaaataccaggatcggtgacggtgatcatattgtgtcgtcttcttcaatggccaactgatgggaggcagtcggacaccgagctccacctgacattcatgaagttgcatgccatacaacgagaggaaaatcggtgggagataaccgcagcagatggcatgaactggggagtttacatacacgcagaggaagtacaggttggcgtgctgacaatgtcatggtcttcggtacttagagtttcggcacttcgctctgttataacctccggctttcgcgccgttagtgtgtttgaggtaccgggaagtgtaaggtccacccttggagctactttaaggcccgatcacgccttatatagtacaactatgcaagccacacccaacgcatcgcatattagtgcttttaaccttcgcatagtttccccgtcggcatatcgtgtttgtcctctccaaaatgacacagatacctacttaggtattccagcagacgtggcggcagttcttccagtagacgtggtgactgatcctaacatcttgctgggcatgcagacaacggtacacattgcggagctagtcaaggcatgtcatccgtcacccgatgttgtgagcgctgtaggggagcacctgaactggctcaacaaactcttactcccacttaaggaatcgactcagttgcaaggaagcgagtcgtacaaggagtgccttgcactcttgggtcgtgttcacgctgcgatgaagatggtgagaattggcttagtagtgccccagctgcaatacagaatgtacggtagcctcatcaaccaaatggcccaagtagcacaaaactacgaccgagaattcaagcaattcaaattattcatcatccaaaatcaaatccttggcagctatttgctgcagcagaacagggcatttgctgagagggagctgcagatggagagctttcattcagcggtcatttctcaaagaaggcaggagttggacgacgccatcgctaagatggaccgattgagcgggcaaatggaggcagagagtagtgcaatggagcaagccaaaaaggaaatggacgaaggattgaggcagttccagaataggcaagttgcgaacgccctctttgccgttcttagcgctgtagctatgattgcgctcgcattcgtcacggctggtgcaacggctcctggggctgtggcgtcggcggggcaagctgtgagcatagcaggtcaggcggcgcaaggtctgcgaagggtggtggaaattctagaggggctcgaggctgtgatggaggttgtggctgctgtgaaggacctcgtggattcattggaacaggtaggtcagattgtggacgcaccggtgatgccggaattgccctcagaggcggactggtccatttttgtgaacgaggtggaggccgtggcagaggggatgccgacggaagtctcggaggttccggtgtggaaggccaagtgcaagaatgtggctgcactgggtcgggagatgagcatcacggcagtacagatgtcggagctgcagtatgacatctgggtgcaaggcatgatgcgggatatggctcgaagccacgcagaccggctggcagcgattcaacctgctaatcttaccaactatttggagatggcaatacagatggatatgcggactacgaggatgctgctggggctcctcaacatattgcgcatccagaatgcggcgctcaggtacgagtatcttctaacgcccacggagctcacaacatggccactgggtatggataccgtgggtgacttgctcatcgcgcaggagaatgctgcactgataggattaatgcagctagggcccccatcggacttcacgagcaggcatgtagtgaaaggcatacctgtgagcttgcttctagacggtggggattgggaatttgagattcctgtgcaaggtggcatgtccagtttcccttccagctggtctcgcgtccgtattcggcacctggagatgcactttgtgaaggaggccagcggtattggtggtgagattatccaccagcctaccacccagactgggaccgtttacatccttctgcagggctccactgtcttccatgatcgcagaagggaggaggtgatgacctttcaggcagcggttccgctcaactaccattacgcgtaccgcctcgacaccggcgactccactctcacaaacgaaccctctgaacagtttgccaacaagttcatgcagatgacaccgttcacccgttggaggcttcgtctgtctgcgtccgcaaaagagaatgcaggattagcctttcccacagctacagctcccgactccaccactgagattgtcatcactttccatgttacggccatcagacaaattgactggcggcacgacgaagagtagc

SEQ ID NO: 477 - DNA, 2598 bp, synthetic construct
  misc_feature 1..2598: note = Synthetic
  source 1..2598: mol_type = other DNA
atggctctcgtggattacggcaagcttttcgaggatctgaaccagataagcatgggtgtactggatcgggtagagttttcagaggtgatggtgatccacaggatgtatgtgaggctagctgatctgaatgtggggcagctcgagggagccgagaaagtgaagcggttgtatgtgtttgcggacgtggtggagctaccagtcgtggaatggcggtggccgccgcaaataccaggatcggtgacggtgatcatattgtgtcgtcttcttcaatggccaactgatgggaggcagtcggacaccgagctccacctgacattcatgaagttgcatgccatacaacgagaggaaaatcggtgggagataaccgcagcagatggcatgaactggggagtttacatacacgcagaggaagtacaggttggcgtgctgacaatgtcatggtcttcggtacttagagtttcggcacttcgctctgttataacctccggctttcgcgccgttagtgtgtttgaggtaccgggaagtgtaaggtccacccttggagctactttaaggcccgatcacgccttatatagtacaactatgcaagccacacccaacgcatcgcatattagtgcttttaaccttcgcatagtttccccgtcggcatatcgtgtttgtcctctccaaaatgacacagatacctacttaggtattccagcagacgtggcggcagttcttccagtagacgtggtgactgatcctaacatcttgctgggcatgcagacaacggtacacattgcggagctagtcaaggcatgtcatccgtcacccgatgttgtgagcgctgtaggggagcacctgaactggctcaacaaactcttactcccacttaaggaatcgactcagttgcaaggaagcgagtcgtacaaggagtgccttgcactcttgggtcgtgttcacgctgcgatgaagatggtgagaattggcttagtagtgccccagctgcaatacagaatgtacggtagcctcatcaaccaaatggcccaagtagcacaaaactacgaccgagaattcaagcaattcaaattattcatcatccaaaatcaaatccttggcagctatttgctgcagcagaacagggcatttgctgagagggagctgcagatggagagctttcatgctgctgtcatttctcaaagaaggcaggagttggacgacgccatcgctaagatggaccgactgagcttgcagatggaggcagaggacagagcaatggagcaagccaaaaaggaaatggacgaaggattgaagcagttccagaataggcaagttgcgaacgccctctttgccgttcttagcgctgtagctcagattgggctcgcattcgtcacggctggtgcaacggctcctggagctgtggcgtcggcggggcaagctgtgagcatagcaggtcaggcggcgcaaggtctgcgaagggtggtggagattctagagcagctggaggctgtgatggaggttgtggctgctgtgaaggacctcgtggattcattggaacaggtaggtcagattgtggacgcaccggtgatgccggaattgccctcagaggcggactggtccatttttgtgaacgaggtggaggccgtggcagagggcatgccgacggaagtctcggaggttccggtgtggagggccaagtgcaagaatgtggctgcactgggtcgggagatgagcatcacggcagtacagatgtcggagctgcagtatgacatctgggtgcaaggcttgttgcgggatatagctcaaagccacgcagaccggctggcagcgattcaacccgcggaccttaccaactatttggagatggctacccagatggatatgcggactacgaggatgctgctggggctcctcaacatattgcgcatccagaatgcggcgctcaggtacgagtatcttctaatgcccacggagctcacaacatggccactgggtatggataccgtgggtgacttgctcatcgcgcaggagaatgctgcactgataggattaatgcagctagggccctcatctgatttcacgagcaggcatgtggtgaaagacatacctgtgaacttgctgctcgatggcgaggattgggaatttgagattcctgtgcaaggtggcatgtccagcttcccttccagctggtctcgcgtccgtattcggcacctggagatgcactttgtgcaggaggcgagcggtggcggcgagattatccaccagcctgccacccagacggggaccattcacatcctcctgcagggctccactgtcttccatgaccgcagaagagaccaggtgttgccttttcaggccgctgctccgctcaactaccattacgcgtaccgcctcgacactggagaagccactcttacgaacgaaccctctgaacagtttgccaacaagttcatgcagatgacacccttcacccgttggaggcttcgtctgtctgcgtccgcaaaagagaatgcaggattagcctttcccacagctacagctcccgactccaccactgagattgccatcactttccatgttacggccattagacaaattgactggcggcaagaggaggag

SEQ ID NO: 478 - DNA, 2598 bp, synthetic construct
  misc_feature 1..2598: note = Synthetic
  source 1..2598: mol_type = other DNA
atggctctcgtggattacggcaagcttttcgaggatctgaaccagataagcatgggtgtactggatcgggtagagttttcagaggtgatggtgatccacaggatgtatgtgaggctagctgatctgaatgtggggcagctcgagggagccgagaaagtgaagcggttgtatgtgtttgcggacgtggtggagctaccagtcgtggaatggcggtggccgccgcaaataccaggatcggtgacggtgatcatattgtgtcgtcttcttcaatggccaactgatgggaggcagtcggacaccgagctccacctgacattcatgaagttgcatgccatacaacgagaggaaaatcggtgggagataaccgcagcagatggcatgaactggggagtttacatacacgcagaggaagtacaggttggcgtgctgacaatgtcatggtcttcggtacttagagtttcggcacttcgctctgttataacctccggctttcgcgccgttagtgtgtttgaggtaccgggaagtgtaaggtccacccttggagctactttaaggcccgatcacgccttatatagtacaactatgcaagccacacccaacgcatcgcatattagtgcttttaaccttcgcatagtttccccgtcggcatatcgtgtttgtcctctccaaaatgacacagatacctacttaggtattccagcagacgtggcggcagttcttccagtagacgtggtgactgatcctaacatcttgctgggcatgcagacaacggtacacattgcggagctagtcaaggcatgtcatccgtcacccgatgttgtgagcgctgtaggggagcacctgaactggctcaacaaactcttactcccacttaaggaatcgactcagttgcaaggaagcgagtcgtacaaggagtgccttgcactcttgggtcgtgttcacgctgcgatgaagatggtgagaattggcttagtagtgccccagctgcaatacagaatgtacggtagcctcatcaaccaaatggcccaagtagcacaaaactacgaccgagaattcaagcaattcaaattattcatcatccaaaatcaaatccttggcagctatttgctgcagcagaacagggcatttgctgacagagaggtgcagatggagagctttcatgctgctgtcatttctcaaagaagggaggagttggacaatacattcgcaaagatggaccgattgagcgggcaaatggaggcagagagtagtgcaatggagcaagccaaaaaggaaatggacgaaggattgaggcagttccagaataggcaagttgcgaacgccctctttgccgttcttagcgctgtagctcagattgggcttgcattccttacggctggtgcaacggctcctggagctgtggcgtcggcggggcaagctgtgagcatagcaggtcaggcggcgcaaggtctgcgaagggtggtggaaattctagagcagctggaggctgtgatggaggttgtggctgctgtgaaggacctcgtggattcattggaacaggtaagtcagattgtggatgcaccacctatgccagacatgccctcagaggcggactggtccatttttgtgaacgaggtggaggccgtggcagagggcatgccaacggaagtctcggaggttccggtgtggagggccaagtgcaagaatgtggctgcactgggtcgggagatgagcatcacggcagaacagatttcccagctccagtatgacatctgggtgcaaggcatgatgcgggatatggctcgaagccaggcagacaggctggccgcaattcaacccgcggaccttaccaactatttggagatggctacccagatggatatgcggactacgaggatgctgctggggctcctcaacatattgcgcatccagaatgcggcacttatgtatgagtaccttctaacgcccacgcagctcactgcatggccgctgagaatggatactgtggccaacttgctcatcacgcacgagagtgctgcactgtcaggattagctcagttagggcccccatcggacttcacgagcaggcatgtagtgaaagacatacctgtgaacttgctgctcgatggcgaggattgggagtttgagattcctgtgcaagctggcatgtccagcttcccttccagctggactcgagtgcggattcggcacctggagatgcactttgtgcaggaggcgagcggtggcggcgagattatccaccagcctaccacccagactgggaccgtttacatccttctgcagggttccactatcttccatgatcgcagaagggaggaggtgatgacctttcaggcagcggttccgctcaactaccattacgcgtaccgcctcgacactggagaagccactcttacgaacgagccctcggaacagtttgccaacacattcatgcagatgacaccgttcactcactggaggctacgtctgtctgcgtccgcagcggagaataaaggattagcctttcccacagctacagctcccgactccaccactgagattgccatcactttccatgttacggccattagacaaattgactggcggcaagaggaggag

SEQ ID NO: 479 - DNA, 2602 bp, synthetic construct
  misc_feature 1..2602: note = Synthetic
  source 1..2602: mol_type = other DNA
atggctctcgtggattacggcaagcttttcgaggatctgaaccagataagcatgggtgtactggatcgggtagagttttcagaggtgatggtgatccacaggatgtatgtgaggctagctgatctgaatgtggggcagctcgagggagccgagaaagtgaagcggttgtatgtgtttgcggacgtggtggagctaccagtcgtggaatggcggtggccgccgcaaataccaggatcggtgacggtgatcatattgtgtcgtcttcttcaatggccaactgatgggaggcagtcggacaccgagctccacctgacattcatgaagttgcatgccatacaacgagaggaaaatcggtgggagataaccgcagcagatggcatgaactggggagtttacatacacgcagaggaagtacaggttggcgtgctgacaatgtcatggtcttcggtacttagagtttcggcacttcgctctgttataacctccggctttcgcgccgttagtgtgtttgaggtaccgggaagtgtaaggtccacccttggagctactttaaggcccgatcacgccttatatagtacaactatgcaagccacacccaacgcatcgcatattagtgcttttaaccttcgcatagtttccccgtcggcatatcgtgtttgtcctctccaaaatgacacagatacctacttaggtattccagcagacgtggcggcagttcttccagtagacgtggtgactgatcctaacatcttgctgggcatgcagacaacggtacacattgcggagctagtcaaggcatgtcatccgtcacccgatgttgtgagcgctgtaggggagcacctgaactggctcaacaaactcttactcccacttaaggaatcgactcagttgcaaggaagcgagtcgtacaaggagtgccttgcactcttgggtcgtgttcacgctgcgatgaagatggtgagaattggcttagtagtgccccagctgcaatacagaatgtacggtagcctcatcaaccaaatggcccaagtagcacaaaactacgaccgagaattcaagcaattcaaattattcatcatccaaaatcaaatccttggcagctatttgctgcagcagaacaaggcctttgctgacagagaggtgcagatggagagctttcattcagcggtcatttctcaaagaaggcaggagttggacgacgccatcgctaagatggaccgactgagcgggcaaatggaggcagagagtagtgcaatggagcaagccaaaaaggaaatggacgaaggattgaggcagttccagaataggcaagttgcgaacgccctctttgccgttcttagcgctgtagctcagattgggcttgcattcgtcacggctggtgcaacggctcctggagctgtggcgtcggcggggcaagctgtgagcatagcaggtcaggcggcgcaaggtctgcgaagggtggtggaaattctagaggggctcgaggctgtgatggaggttgtggctgctgtgaaggacctcgtggattcattggaacaggtaggtcagattgtggacgcaccggtgatgccggaattgccctcagaggcggactggtccatttttgtgaacgaggtggaggccgtggcagagggcatgccaacggaagtctcggaggttccggtgtggagggccaagtgcaagaatgtggctgcactgggtagggagatgtgcatcacggcagtacagatgtcggagctgcagtatgacatctgggtgcaaggcttgttgcgggatatggctcgaagccaggcagacaggctggccgcaattcaacccgcggaccttaccaactatttggagatggctacccagatggatatgcggactacgaggatgctgctggggctcctcaacatattgcgcatccagaatgcggcgctcaggtacgagtatcttctaatgcccacggagctcacaacatggccactgggtatggataccgtgggtgacttgctcatcgcgcaggagaatgctgcactgataggattaatgcagctagggccctcatctgatttcacgagcaggcatgtagtgaaaggcatacctgtgagcttgcttctagacggtggggattgggaatttgagattcctgtgcaagctggcatgtccagtttcccttccagctggactcgagtgcggattcggcacctggagatgcactttgtgaaggaggcgagcggtggcggcgagattatccaccagcctgccacccagacggggaccatttacatccttctgcagggttccactatcttccatgaccgcagaagagaccaggtgttgccttttcaggccgctgctccgctcaactaccattacgcgtaccgcctcgacactggagaagccactcttacgaacgagccctctgaacagtttgccaacacattcatgcagatgacacccttcacccgttggaggcttcgtctgtctgcgtccgcagcggagaataaaggattagcctttcccacagctacagctcccgactccaccactgagattgccatcactttccatgttacggccatcagacaaattgactggcggcacgacgaagagtagc

SEQ ID NO: 480 - DNA, 2605 bp, synthetic construct
  misc_feature 1..2605: note = Synthetic
  source 1..2605: mol_type = other DNA
atggctctcgtggattacggcaagcttttcgaggatctgaaccagataagcatgggtgtactggatcgggtagagttttcagaggtgatggtgatccacaggatgtatgtgaggctagctgatctgaatgtggggcagctcgagggagccgagaaagtgaagcggttgtatgtgtttgcggacgtggtggagctaccagtcgtggaatggcggtggccgccgcaaataccaggatcggtgacggtgatcatattgtgtcgtcttcttcaatggccaactgatgggaggcagtcggacaccgagctccacctgacattcatgaagttgcatgccatacaacgagaggaaaatcggtgggagataaccgcagcagatggcatgaactggggagtttacatacacgcagaggaagtacaggttggcgtgctgacaatgtcatggtcttcggtacttagagtttcggcacttcgctctgttataacctccggctttcgcgccgttagtgtgtttgaggtaccgggaagtgtaaggtccacccttggagctactttaaggcccgatcacgccttatatagtacaactatgcaagccacacccaacgcatcgcatattagtgcttttaaccttcgcatagtttccccgtcggcatatcgtgtttgtcctctccaaaatgacacagatacctacttaggtattccagcagacgtggcggcagttcttccagtagacgtggtgactgatcctaacatcttgctgggcatgcagacaacggtacacattgcggagctagtcaaggcatgtcatccgtcacccgatgttgtgagcgctgtaggggagcacctgaactggctcaacaaactcttactcccacttaaggaatcgactcagttgcaaggaagcgagtcgtacaaggagtgccttgcactcttgggtcgtgttcacgctgcgatgaagatggtgagaattggcttagtagtgccccagctgcaatacagaatgtacggtagcctcatcaaccaaatggcccaagtagcacaaaactacgaccgagaattcaagcaattcaaattattcatcatccaaaatcaaatccttggcagctatttgctgcagcagaacagggcatttgctgagagggagctgcagatggagagctttcattctgctgtcatttctcaaagaagggaggagttggacaatacattcgcaaagatggaccgattgagcgggcaaatggaggcagagagtagtgcaatggagcaagccaaaaaggaaatggacgaaggattgaggcagttccagaataggcaagttgcgaacgccctctttgccgttcttagcgctgtagctcagattgggcttgcattccttacggctggtgcaacggctcctggggctgcagcatctgcagcgcaagctgtgaacatagccggtcaagcggcacaagctctgcgaagggtggtggaaattctagaggggctcgaggctgtgatggaggttgtggctgctataaagcaccttgtggatgctctggaccaggtaagtcagattgtggacgcaccggtgatgccggaattgccctcagaggcggactggtccatttttgtgaacgaggtggaggccgtggcagagggcatgccaacggaagtctcggaggttccggcgtggaaggccaagtgcaagaatgtggctgcactgggtagggagatgagcatcacggcagtacagatgtcggagctgcagtatgacatctgggtgcaaggcttgttgcgggatatggctcgaagccaggcagacaggctggccgcgattcaacccgcggaccttaccaactatttggagatggctacccagatggatatgcggactacgaggatgctgctggggctcctcaacatattgcgcatccagaatgcggcgctcaggtacgagtatcttctaatgcccacggagctcacaacatggccactgggtatggataccgtgggtgacttgctcatcacgcacgagagtgctgcactgtcaggattagctcagttagggcccccatcggacttcacgagcaggcatgtggtgaaaggcatacctgtgagcttgctgctcgatggcgaggattgggagtttgagattcctgtgcaagctggcatgtccagtttcccttccagctggtctcgcgtccgtattcggcacctggagatgcactttgtgaaggaggccagcggtattggtggtgagattatccaccagcctaccacccagactgggaccgtttacatcctcctgcagggctccactgtcttccatgatcgcagaagggaggaggtgatgacctttcaggccgctgctccgctcaactaccattacgcgtaccgcctcgacactggagaagccactcttacgaacgagccctcggaacagtttgccaacacattcatgcagatgacacccttcacccgttggaggctacgtctgtctgcgtccgcaaaagagaatgcaggattagcctttcccacagctacagctcccgactccaccactgagattgccatcactttccatgttacggccatcagacaaattgactggcggcacgacgaagagtagc

SEQ ID NO: 481 - DNA, 2598 bp, synthetic construct
  misc_feature 1..2598: note = Synthetic
  source 1..2598: mol_type = other DNA
atggctctcgtggattacggcaagcttttcgaggatctgaaccagataagcatgggtgtactggatcgggtagagttttcagaggtgatggtgatccacaggatgtatgtgaggctagctgatctgaatgtggggcagctcgagggagccgagaaagtgaagcggttgtatgtgtttgcggacgtggtggagctaccagtcgtggaatggcggtggccgccgcaaataccaggatcggtgacggtgatcatattgtgtcgtcttcttcaatggccaactgatgggaggcagtcggacaccgagctccacctgacattcatgaagttgcatgccatacaacgagaggaaaatcggtgggagataaccgcagcagatggcatgaactggggagtttacatacacgcagaggaagtacaggttggcgtgctgacaatgtcatggtcttcggtacttagagtttcggcacttcgctctgttataacctccggctttcgcgccgttagtgtgtttgaggtaccgggaagtgtaaggtccacccttggagctactttaaggcccgatcacgccttatatagtacaactatgcaagccacacccaacgcatcgcatattagtgcttttaaccttcgcatagtttccccgtcggcatatcgtgtttgtcctctccaaaatgacacagatacctacttaggtattccagcagacgtggcggcagttcttccagtagacgtggtgactgatcctaacatcttgctgggcatgcagacaacggtacacattgcggagctagtcaaggcatgtcatccgtcacccgatgttgtgagcgctgtaggggagcacctgaactggctcaacaaactcttactcccacttaaggaatcgactcagttgcaaggaagcgagtcgtacaaggagtgccttgcactcttgggtcgtgttcacgctgcgatgaagatggtgagaattggcttagtagtgccccagctgcaatacagaatgtacggtagcctcatcaaccaaatggcccaagtagcacaaaactacgaccgagaattcaagcaattcaaattattcatcatccaaaatcaaatccttggcagctatttgctgcagcagaacagggcatttgctgagagggagctgcagatggagagctttcatgctgctgtcatttctcaaagaagggaggagttggacgacgccatcgctaagatggaccgactgagcttgcagatggaggaagaggacagagcaatggagcaagccaaaaaggaaatggacgaaggattgaggcagttccagaataggcaagttgcgaacgccctctttgccgttcttagcgctgtagctcagattgggctcgcattcgtcacggctggtgcaacggctcctggagctgtggcgtcggcggggcaagctgtgagcatagcaggtcaggcggcgcaaggtctgcgaagggtggtggaaattctagaggggctcgaggctgtgatggaggttgtggctgctgtgaaggacctcgtggattcattggaacaggtaggtcagattgtggacgcaccggtgatgccagacatgccctcggaggcggactggagtatttttgtgaacgaggtggaggccgtggcagaggggatgccgacggaagtctcggaggttccggtgtggagggccaagtgcaagaatgtggctgcactgggtagggagatgtgcatcacggcagtacagatgtcggagctgcagtatgacatctgggtgcaaggcatgatgcgggatatggctcgaagccaggcagacaggctggccgcaattcaacccgcggaccttaccaactatttggagatggctacccagatggatatgcggactacgaggatgctgctggggctcctcaacataatgcgcatccagaatgcggcacttatgtatgagtaccttctaacgcccacgcagctcactgcatggccgctgagaatggatactgtggccaacttgctcatcacgcaggagaatgctgcactgataggattaatgcagctagggccctcatctgatttcacgagcaggcatgtggtgaaagacatacctgtgaacttgctgctcgatggcgaggattgggagtttgagattcctgtgcaaggtggcatgtccagcttcccttccagctggtctcgcgtccgtattcggcacctggagatgcactttgtgcaggaggcgagcggtggcggcgagattatccaccagcctaccacccagactgggaccgtttacatccttctgcagggttccactatcttccatgaccgcagaagagaccaggtgttgccttttcaggccgctgctccgctcaactaccattacgcgtaccgcctcgacaccggcgactccactctcacaaacgaaccctctgaacagtttgccaacaagttcatgcagatgacacccttcacccgttggaggcttcgtctgtctgcgtccgcagcggagaataaaggattagcctttcccacagctacagctcccgactccaccactgagattgccatcactttccatgttacggccattagacaaattgactggcggcaagaggaggag

SEQ ID NO: 482 - DNA, 2598 bp, synthetic construct
  misc_feature 1..2598: note = Synthetic
  source 1..2598: mol_type = other DNA
atggctctcgtggattacggcaagcttttcgaggatctgaaccagataagcatgggtgtactggatcgggtagagttttcagaggtgatggtgatccacaggatgtatgtgaggctagctgatctgaatgtggggcagctcgagggagccgagaaagtgaagcggttgtatgtgtttgcggacgtggtggagctaccagtcgtggaatggcggtggccgccgcaaataccaggatcggtgacggtgatcatattgtgtcgtcttcttcaatggccaactgatgggaggcagtcggacaccgagctccacctgacattcatgaagttgcatgccatacaacgagaggaaaatcggtgggagataaccgcagcagatggcatgaactggggagtttacatacacgcagaggaagtacaggttggcgtgctgacaatgtcatggtcttcggtacttagagtttcggcacttcgctctgttataacctccggctttcgcgccgttagtgtgtttgaggtaccgggaagtgtaaggtccacccttggagctactttaaggcccgatcacgccttatatagtacaactatgcaagccacacccaacgcatcgcatattagtgcttttaaccttcgcatagtttccccgtcggcatatcgtgtttgtcctctccaaaatgacacagatacctacttaggtattccagcagacgtggcggcagttcttccagtagacgtggtgactgatcctaacatcttgctgggcatgcagacaacggtacacattgcggagctagtcaaggcatgtcatccgtcacccgatgttgtgagcgctgtaggggagcacctgaactggctcaacaaactcttactcccacttaaggaatcgactcagttgcaaggaagcgagtcgtacaaggagtgccttgcactcttgggtcgtgttcacgctgcgatgaagatggtgagaattggcttagtagtgccccagctgcaatacagaatgtacggtagcctcatcaaccaaatggcccaagtagcacaaaactacgaccgagaattcaagcaattcaaattattcatcatccaaaatcaaatccttggcagctatttgctgcagcagaacagggcatttgctgagagggagctgcagatggagagctttcatgctgctgtcatttctcaaagaaggcaggagttggacgacgccatcgctaagatggaccgactgagcttgcagatggaggaagaggacagagcaatggagcaagccaaaaaggaaatggacgaaggattgaggcagttccagaataggcaagttgcgaacgccctctttgccgttcttagcgctgtagctcagattgggcttgcatcccttacggctggtgcaacggctcctggagctgtggcgtcggcggggcaagctgtgagcatagcaggtcaggcggcgcaaggtctgcgaagggtggtggaaattctagaggggctcgaggctgtgatggaggttgtggctgctgtgaaggacctcgtggattcattggaacaggtaggtcagattgtggacgcaccggtgatgccggaattgccctcagaggcggactggtccatttttgtgaacgaggtggaggccgtggcagagggcatgccaacggaagtctcggaggttccggtgtggagggccaagtgcaagaatgtggctgcactgggtagggagatgtgcatcacggcagaacagatgtcggagctgcagtatgacatctgggtgcaaggcatgatgcgggatatggctcgaagccaggcagacaggctggccgcaattcaacccgcggaccttaccaactatttggagatggcaatacagatggatatgcggactacgaggatgctgctggggctcctcaacatattgcgcatccagaatgcggcgctcaggtacgagtatcttctaatgcccacggagctcacaacatggccactgggtatggataccgtgggtgacttgctcatcgcgcaggagaatgctgcactgataggattaatgcagctagggccctcatctgatttcacgagcaggcatgtggtgaaagacatacctgtgaacttgctgctcgatggcgaggattgggagtttgagattcctgtgcaagctggcatgtccagcttcccttccagctggtctcgcgtccgtattcggcacctggagatgcactttgtgcaggaggcgagcggtggcggcgagattatccaccagcctgccacccagacggggaccgtttacatccttctgcagggttccactatcttccatgatcgcagaagggaggaggtgatgacctttcaggcagcggttccgctcaactaccattacgcgtaccgcctcgacaccggcgactccactctcacaaacgaaccctctgaacagtttgccaacaagttcatgcagatgacaccgttcactcgctggaggctacgtctgtctgcgtccgcaaaagagaatgcaggattagcctttcccacagctacagctcccgactccaccactgagattgccatcactttccatgttacggccattagacaaattgactggcggcacgacgaggag

SEQ ID NO: 483 - DNA, 2598 bp, synthetic construct
  misc_feature 1..2598: note = Synthetic
  source 1..2598: mol_type = other DNA
atggctctcgtggattacggcaagcttttcgaggatctgaaccagataagcatgggtgtactggatcgggtagagttttcagaggtgatggtgatccacaggatgtatgtgaggctagctgatctgaatgtggggcagctcgagggagccgagaaagtgaagcggttgtatgtgtttgcggacgtggtggagctaccagtcgtggaatggcggtggccgccgcaaataccaggatcggtgacggtgatcatattgtgtcgtcttcttcaatggccaactgatgggaggcagtcggacaccgagctccacctgacattcatgaagttgcatgccatacaacgagaggaaaatcggtgggagataaccgcagcagatggcatgaactggggagtttacatacacgcagaggaagtacaggttggcgtgctgacaatgtcatggtcttcggtacttagagtttcggcacttcgctctgttataacctccggctttcgcgccgttagtgtgtttgaggtaccgggaagtgtaaggtccacccttggagctactttaaggcccgatcacgccttatatagtacaactatgcaagccacacccaacgcatcgcatattagtgcttttaaccttcgcatagtttccccgtcggcatatcgtgtttgtcctctccaaaatgacacagatacctacttaggtattccagcagacgtggcggcagttcttccagtagacgtggtgactgatcctaacatcttgctgggcatgcagacaacggtacacattgcggagctagtcaaggcatgtcatccgtcacccgatgttgtgagcgctgtaggggagcacctgaactggctcaacaaactcttactcccacttaaggaatcgactcagttgcaaggaagcgagtcgtacaaggagtgccttgcactcttgggtcgtgttcacgctgcgatgaagatggtgagaattggcttagtagtgccccagctgcaatacagaatgtacggtagcctcatcaaccaaatggcccaagtagcacaaaactacgaccgagaattcaagcaattcaaattattcatcatccaaaatcaaatccttggcagctatttgctgcagcagaacagggcatttgctgagagggagctgcagatggagagctttcatgctgctgtcatttctcaaagaaggcaggagttggacgacgccatcgctaagatggaccgactgagcttgcagatggaggaagaggacagagcaatggagcaagcccgaaaagaaatggaagaaggattgaggcagttccagaatgagcaagttgcaagggctgtgttcgctgttcttaaatctgtagctatgattgcgctcgcattcgtcacggctggtgcaacggctcctggagctgtggcgtcggcggggcaagctgtgagcatagcaggtcaggcggcgcaaggtctgcgaagggtggtggaaattctagaggggctcgaggctgtgatggaggttgtggctgctgtgaaggacctcgtggattcattggaacaggtaggtcagattgtggacgcaccggtgatgccggaattgccctcagaggcggactggtccatttttgtgaacgaggtggaggccgtggcagaggggatgccgacggaagtctcggaggttccggcgtggagggccaagtgcaagaatgtggctgcactgggtcgggagatgtgcatcacggcagtacagatgtcggagctgcagtatgacatctgggtgcaaggcatgatgcgggatatggctcgaagccaggcagacaggctggccgcaattcaacccgcggaccttaccaactatttggagatggcaatacagatggatatgcggactacgaggatgctgctggggctcctcaacatattgcgcatccagaatgcggcgctcaggtacgagtatcttctaatgcccacggagctcacaacatggccactgggtatggataccgtgggtgacttgctcatcgcgcacgagagtgctgcactgtcaggattagctcagttagggcccccatcggacttcacgagcaggcatgtagtgaaaggcatacctgtgagcttgcttctagacggtggggattgggaatttgagattcctgtgcaaggtggcatgtccagtttcccttccagctggactcgagtgcggattcggcacctggagatgcactttgtgcaggaggcgagcggtggcggcgagattatccaccagcctgccacccagacggggaccatttacatcctcctgcagggctccactgtcttccatgaccgcagaagagaccaggtgttgccttttcaggccgctgctccgctcaactaccattacgcgtaccgcctcgacaccggcgactccactctcacaaacgaaccctctgaacagtttgccaacaagttcatgcagatgacaccgttcactcactggaggctacgtctgtctgcgtccgcaaaagagaatgcaggattagcctttcccacggctacagcacttgactccactacccagattgtcatcactttccatgttacggccatcagacaaattgactggcggcaagaggaggag

SEQ ID NO: 484 - DNA, 2605 bp, synthetic construct
  misc_feature 1..2605: note = Synthetic
  source 1..2605: mol_type = other DNA
atggctctcgtggattacggcaagcttttcgaggatctgaaccagataagcatgggtgtactggatcgggtagagttttcagaggtgatggtgatccacaggatgtatgtgaggctagctgatctgaatgtggggcagctcgagggagccgagaaagtgaagcggttgtatgtgtttgcggacgtggtggagctaccagtcgtggaatggcggtggccgccgcaaataccaggatcggtgacggtgatcatattgtgtcgtcttcttcaatggccaactgatgggaggcagtcggacaccgagctccacctgacattcatgaagttgcatgccatacaacgagaggaaaatcggtgggagataaccgcagcagatggcatgaactggggagtttacatacacgcagaggaagtacaggttggcgtgctgacaatgtcatggtcttcggtacttagagtttcggcacttcgctctgttataacctccggctttcgcgccgttagtgtgtttgaggtaccgggaagtgtaaggtccacccttggagctactttaaggcccgatcacgccttatatagtacaactatgcaagccacacccaacgcatcgcatattagtgcttttaaccttcgcatagtttccccgtcggcatatcgtgtttgtcctctccaaaatgacacagatacctacttaggtattccagcagacgtggcggcagttcttccagtagacgtggtgactgatcctaacatcttgctgggcatgcagacaacggtacacattgcggagctagtcaaggcatgtcatccgtcacccgatgttgtgagcgctgtaggggagcacctgaactggctcaacaaactcttactcccacttaaggaatcgactcagttgcaaggaagcgagtcgtacaaggagtgccttgcactcttgggtcgtgttcacgctgcgatgaagatggtgagaattggcttagtagtgccccagctgcaatacagaatgtacggtagcctcatcaaccaaatggcccaagtagcacaaaactacgaccgagaattcaagcaattcaaattattcatcatccaaaatcaaatccttggcagctatttgctgcagcagaacagggcatttgctgagagggagctgcagatggagagctttcatgctgctgtcatttctcaaagaaggcaggagttggacaatacattcgcaaagatggaccgattgagcgggcaaatggaggaagaggacagagcaatggagcaagcccgaaaagaaatggaagaaggattgaggcagttccagaataggcaagttgcgaacgccctctttgccgttcttagcgctgtagctcagattgggcttgcattccttacggctggtgcaacggctcctggagctgtggcgtcggcggggcaagctgtgagcatagcaggtcaggcggcgcaaggtctgcgaagggtggtggaaattctagaggggctcgaggctgtgatggaggttgtggctgctgtgaaggacctcgtggattcattggaacaggtaggtcagattgtggacgcaccggtgatgccggaattgccctcagaggcggactggtccatttttgtgaatgagattgaagccgtggcagaggggatgccgacggaagtctcggaggttccggcgtggaaggccaagtgcaagaatgtggctgcactgggtagggagatgagcatcacggcagtacagatgtcggagctgcagtatgacatctgggtgcaaggcatgatgcgggatatggctcgaagccaggcagacaggctggccgcaattcaacccgcggaccttaccaactatttggagatggctacccagatggatatgcggactacgaggatgctgctggggctcctcaacataatgcgcatccagaatgcggcacttatgtatgagtaccttctaacgcccacgcagctcactgcatggccactgggtatggataccgtgggtgacttgctcatcacgcacgagagtgctgcactgtcaggattagctcagttagggcccccatcggacttcacgagcaggcatgtagtgaaaggcatacctgtgagcttgcttctagacggtggggattgggaatttgagattcctgtgcaaggtggcatgtccagtttcccttccagctggtctcgcgtccgtattcggcacctggagatgcactttgtgaaggaggccagcggtattggtggtgagattatccaccagcctgccacccagacggggaccatttacatcctcctgcagggctccactgtcttccatgatcgcagaagagaccaggtgttgccttttcaggccgctgctccgctcaactaccattacgcgtaccgcctcgacactggagaagccactcttacgaacgaaccctctgaacagtttgccaacaagttcatgcagatgacacccttcacccgttggaggcttcgtctgtctgcgtccgcaaaagagaatgcaggattagcctttcccacggctacagcacttgactccactacccagattgtcatcactttccatgttacggccatcagacaaattgactggcggcaagaggaggagtagc

SEQ ID NO: 485 - DNA, 2602 bp, synthetic construct
  misc_feature 1..2602: note = Synthetic
  source 1..2602: mol_type = other DNA
atggctctcgtggattacggcaagcttttcgaggatctgaaccagataagcatgggtgtactggatcgggtagagttttcagaggtgatggtgatccacaggatgtatgtgaggctagctgatctgaatgtggggcagctcgagggagccgagaaagtgaagcggttgtatgtgtttgcggacgtggtggagctaccagtcgtggaatggcggtggccgccgcaaataccaggatcggtgacggtgatcatattgtgtcgtcttcttcaatggccaactgatgggaggcagtcggacaccgagctccacctgacattcatgaagttgcatgccatacaacgagaggaaaatcggtgggagataaccgcagcagatggcatgaactggggagtttacatacacgcagaggaagtacaggttggcgtgctgacaatgtcatggtcttcggtacttagagtttcggcacttcgctctgttataacctccggctttcgcgccgttagtgtgtttgaggtaccgggaagtgtaaggtccacccttggagctactttaaggcccgatcacgccttatatagtacaactatgcaagccacacccaacgcatcgcatattagtgcttttaaccttcgcatagtttccccgtcggcatatcgtgtttgtcctctccaaaatgacacagatacctacttaggtattccagcagacgtggcggcagttcttccagtagacgtggtgactgatcctaacatcttgctgggcatgcagacaacggtacacattgcggagctagtcaaggcatgtcatccgtcacccgatgttgtgagcgctgtaggggagcacctgaactggctcaacaaactcttactcccacttaaggaatcgactcagttgcaaggaagcgagtcgtacaaggagtgccttgcactcttgggtcgtgttcacgctgcgatgaagatggtgagaattggcttagtagtgccccagctgcaatacagaatgtacggtagcctcatcaaccaaatggcccaagtagcacaaaactacgaccgagaattcaagcaattcaaattattcatcatccaaaatcaaatccttggcagctatttgctgcagcagaacagggcatttgctgagagggagctgcagatggagagctttcattcagcggtcatttctcaaagaaggcaggagttggacgacgccatcgctaagatggaccgattgagcgggcaaatggaggcagagagtagtgcaatggagcaagccaaaaaggaaatggacgaaggattgaggcagttccagaataggcaagttgcgaacgccctctttgccgttcttagcgctgtagctcagattgggcttgcactccttacggctggtgcaacggctcctggagctgtggcgtcggcggggcaagctgtgagcatagcaggtcaggcggcgcaaggtctgcgaagggtggtggaaactctagagcagctggaggctgtgatggaggttgtggctgctgtgaaggacctcgtggattcattggaacaggtaggtcagattgtggatgcaccacctatgccagacatgccctcggaggcggactggtccatttttgtgaatgagattgaagccgtggcagaggggatgccgacggaagtctcggaggttccggcgtggaaggccaagtgcaagaatgtggctgcactgggtcgggagatgagcatcacggcagtacagatgtcggagctgcagtatgacatctgggtgcaaggcatgatgcgggatatggctcgaagccaggcagacaggctggccgcaattcaacccgcggaccttaccaactatttggagatggctacccagatggatatgcggactacgaggatgctgctggggctcctcaacatattgcgcatccagaatgcggcgctcaggtacgagtatcttctaatgcccacggagctcacaacatggccactgggtatggataccgtgggtgacttgctcatcgcgcaggagaatgctgcactgataggattaatgcagctagggccctcatctgatttcacgagcaggcatgtggtgaaaggcatacctgtgagcttgcttctagacggtggggattgggaatttgagattcctgtgcaaggtggcatgtccagcttcccttccagctggtctcgcgtccgtattcggcacctggagatgcactttgtgcaggaggcgagcggtggcggcgagattatccaccagcctaccacccagactgggaccgtttacatccttctgcagggttccactatcttccatgaccgcagaagggaggaggtgatgacctttcaggcagcggttccgctcaactaccattacgcgtaccgcctcgacactggagaagccactcttacgaacgagccctcggaacagtttgccaacaagttcatgcagatgacacccttcacccgttggaggcttcgtctgtctgcgtccgcaaaagagaatgcaggattagcctttcccacggctacagcacttgactccactacccagattgtcatcactttccatgttacggccatcagacaaattgactggcggcacgacgaagagtagc

SEQ ID NO: 486 - DNA, 2601 bp, synthetic construct
  misc_feature 1..2601: note = Synthetic
  source 1..2601: mol_type = other DNA
atggctctcgtggattacggcaagcttttcgaggatctgaaccagataagcatgggtgtactggatcgggtagagttttcagaggtgatggtgatccacaggatgtatgtgaggctagctgatctgaatgtggggcagctcgagggagccgagaaagtgaagcggttgtatgtgtttgcggacgtggtggagctaccagtcgtggaatggcggtggccgccgcaaataccaggatcggtgacggtgatcatattgtgtcgtcttcttcaatggccaactgatgggaggcagtcggacaccgagctccacctgacattcatgaagttgcatgccatacaacgagaggaaaatcggtgggagataaccgcagcagatggcatgaactggggagtttacatacacgcagaggaagtacaggttggcgtgctgacaatgtcatggtcttcggtacttagagtttcggcacttcgctctgttataacctccggctttcgcgccgttagtgtgtttgaggtaccgggaagtgtaaggtccacccttggagctactttaaggcccgatcacgccttatatagtacaactatgcaagccacacccaacgcatcgcatattagtgcttttaaccttcgcatagtttccccgtcggcatatcgtgtttgtcctctccaaaatgacacagatacctacttaggtattccagcagacgtggcggcagttcttccagtagacgtggtgactgatcctaacatcttgctgggcatgcagacaacggtacacattgcggagctagtcaaggcatgtcatccgtcacccgatgttgtgagcgctgtaggggagcacctgaactggctcaacaaactcttactcccacttaaggaatcgactcagttgcaaggaagcgagtcgtacaaggagtgccttgcactcttgggtcgtgttcacgctgcgatgaagatggtgagaattggcttagtagtgccccagctgcaatacagaatgtacggtagcctcatcaaccaaatggcccaagtagcacaaaactacgaccgagaattcaagcaattcaaattattcatcatccaaaatcaaatccttggcagctatttgctgcagcagaacagggcatttgctgagagggagctgcagatggagagctttcattctgctgtcatttctcaaagaaggcaggagttggacgacgccatcgctaagatggaccgactgagcttgcagatggaggaagaggacagagcaatggagcaagcccgaaaagaaatggaagaaggattgaggcagttccagaataggcaagttgcgaacgccctctttgccgttcttaaatctgtagctatgattgcgctcgcattcgtcacggctggtgcaacggctcctggggctgtggcgtcggcggggcaagctgtgagcatagcaggtcaggcggcgcaaggtctgcgaagggtggtggaaattctagagcagctggaggctgtgatggaggttgtggctgctgtgaaggacctcgtggattcattggaacaggtaggtcagattgtggacgcaccggtgatgccagacatgccctcggaggcggactggagtatttttgtgaacgaggtggaggccgtggcagagggcatgccaacggaagtctcggaggttccggtgtggagggccaagtgcaagaatgtggctgcactgggtcgggagatgagcatcacggcagtacagatgtcggagctgcagtatgacatctgggtgcaaggcatgatgcgggatatggctcgaagccaggcagacaggctggcagcgattcaacctgctaatcttaccaactatttggagatggctacccagatggatatgcggactacgaggatgctgctggggctcctcaacataatgcgcatccagaatgcggcgctcaggtacgagtatcttctaatgcccacggagctcacaacatggccactgggtatggataccgtgggtgacttgctcatcgcgcaggagaatgctgcactgataggattaatgcagctagggccctcatctgatttcacgagcaggcatgtagtgaaaggcatacctgtgagcttgcttctagacggtggggattgggagtttgagattcctgtgcaaggtggcatgtccagcttcccttccagctggtctcgcgtccgtattcggcacctggagatgcactttgtgcaggaggccagcggtattggtggtgagattatccaccagcctgccacccagacggggaccatttacatcctcctgcagggctccactgtcttccatgatcgcagaagagaccaggtgttgccttttcaggccgctgctccgctcaactaccattacgcgtaccgcctcgacaccggcgactccactctcacaaacgaaccctctgaacagtttgccaacaagttcatgcagatgacacccttcacccgttggaggctacgtctgtctgcgtccgcaaaagagaatgcaggattagcctttcccacggctacagcacttgactccaccactgagattgccatcactttccatgttacggccatcagacaaattgactggcggcaagaggaggag

SEQ ID NO: 487 - DNA, 2598 bp, synthetic construct
  misc_feature 1..2598: note = Synthetic
  source 1..2598: mol_type = other DNA
atggctctcgtggattacggcaagcttttcgaggatctgaaccagataagcatgggtgtactggatcgggtagagttttcagaggtgatggtgatccacaggatgtatgtgaggctagctgatctgaatgtggggcagctcgagggagccgagaaagtgaagcggttgtatgtgtttgcggacgtggtggagctaccagtcgtggaatggcggtggccgccgcaaataccaggatcggtgacggtgatcatattgtgtcgtcttcttcaatggccaactgatgggaggcagtcggacaccgagctccacctgacattcatgaagttgcatgccatacaacgagaggaaaatcggtgggagataaccgcagcagatggcatgaactggggagtttacatacacgcagaggaagtacaggttggcgtgctgacaatgtcatggtcttcggtacttagagtttcggcacttcgctctgttataacctccggctttcgcgccgttagtgtgtttgaggtaccgggaagtgtaaggtccacccttggagctactttaaggcccgatcacgccttatatagtacaactatgcaagccacacccaacgcatcgcatattagtgcttttaaccttcgcatagtttccccgtcggcatatcgtgtttgtcctctccaaaatgacacagatacctacttaggtattccagcagacgtggcggcagttcttccagtagacgtggtgactgatcctaacatcttgctgggcatgcagacaacggtacacattgcggagctagtcaaggcatgtcatccgtcacccgatgttgtgagcgctgtaggggagcacctgaactggctcaacaaactcttactcccacttaaggaatcgactcagttgcaaggaagcgagtcgtacaaggagtgccttgcactcttgggtcgtgttcacgctgcgatgaagatggtgagaattggcttagtagtgccccagctgcaatacagaatgtacggtagcctcatcaaccaaatggcccaagtagcacaaaactacgaccgagaattcaagcaattcaaattattcatcatccaaaatcaaatccttggcagctatttgctgcagcagaacagggcatttgctgagagggagctgcagatggagagctttcatgctgctgtcatttctcaaagaagggaggagttggacaatacattcgcaaagatggaccgattgagcgggcaaatggaggcagagagtagtgcaatggagcaagccaaaaaggaaatggacgaaggattgaggcagttccagaataggcaagttgcgaacgccctctttgccgttcttagcgctgtagctcagattgggcttgcattccttacggctggtgcaacggctcctggggctgcagcatctgcagcgcaagctgtgaacatagccggtcaggcggcgcaaggtctgcgaagggtggtggaaattctagaggggctcgaggctgtgatggaggttgtggctgctgtgaaggacctcgtggattcattggaacaggtaggtcagattgtggacgcaccggtgatgccggaattgccctcagaggcggactggagtatttttgtgaacgaggtggaggccgtggcagaggggatgccgacggaagtctcggaggttccggcgtggaaggccaagtgcaagaatgtggctgcactgggtcgggagatgagcatcacggcagaacagatttcccagctccagtatgacatctgggtgcaaggcatgatgcgggatatggctcgaagccaggcagacaggctggccgcaattcaacccgcggaccttaccaactatttggagatggctacccagatggatatgcggactacgaggatgctgctggggctcctcaacatattgcgcatccagaatgcggcgctcaggtacgagtatcttctaatgcccacggagctcacaacatggccactgggtatggataccgtgggtgacttgctcatcgcgcaggagaatgctgcactgataggattagctcagttagggcccccatcggacttcacgagcaggcatgtagtgaaaggcatacctgtgagcttgcttctagacggtggggattgggaatttgagattcctgtgcaagctggcatgtccagtttcccttccagctggactcgagtgcggattcggcacctggagatgcactttgtgcaggaggcgagcggtggcggcgagattatccaccagcctgccacccagacggggaccatttacatcctcctgcagggctccactgtcttccatgatcgcagaagggaggaggtgatgacctttcaggccgctgctccgctcaactaccattacgcgtaccgcctcgacaccggcgactccactctcacaaacgaaccctctgaacagtttgccaacacattcatgcagatgacaccgttcactcactggaggctacgtctgtctgcgtccgcaaaagagaatgcaggattagcctttcccacggctacagcacttgactccaccactgagattgccatcactttccatgttacggccatcagacaaattgactggcggcaagaggaggag

SEQ ID NO: 488 - DNA, 2605 bp, synthetic construct
  misc_feature 1..2605: note = Synthetic
  source 1..2605: mol_type = other DNA
atggctctcgtggattacggcaagcttttcgaggatctgaaccagataagcatgggtgtactggatcgggtagagttttcagaggtgatggtgatccacaggatgtatgtgaggctagctgatctgaatgtggggcagctcgagggagccgagaaagtgaagcggttgtatgtgtttgcggacgtggtggagctaccagtcgtggaatggcggtggccgccgcaaataccaggatcggtgacggtgatcatattgtgtcgtcttcttcaatggccaactgatgggaggcagtcggacaccgagctccacctgacattcatgaagttgcatgccatacaacgagaggaaaatcggtgggagataaccgcagcagatggcatgaactggggagtttacatacacgcagaggaagtacaggttggcgtgctgacaatgtcatggtcttcggtacttagagtttcggcacttcgctctgttataacctccggctttcgcgccgttagtgtgtttgaggtaccgggaagtgtaaggtccacccttggagctactttaaggcccgatcacgccttatatagtacaactatgcaagccacacccaacgcatcgcatattagtgcttttaaccttcgcatagtttccccgtcggcatatcgtgtttgtcctctccaaaatgacacagatacctacttaggtattccagcagacgtggcggcagttcttccagtagacgtggtgactgatcctaacatcttgctgggcatgcagacaacggtacacattgcggagctagtcaaggcatgtcatccgtcacccgatgttgtgagcgctgtaggggagcacctgaactggctcaacaaactcttactcccacttaaggaatcgactcagttgcaaggaagcgagtcgtacaaggagtgccttgcactcttgggtcgtgttcacgctgcgatgaagatggtgagaattggcttagtagtgccccagctgcaatacagaatgtacggtagcctcatcaaccaaatggcccaagtagcacaaaactacgaccgagaattcaagcaattcaaattattcatcatccaaaatcaaatccttggcagctatttgctgcagcagaacagggcatttgctgagagggagctgcagatggagagctttcattctgctgtcatttctcaaagaagggaggagttggacaatacattcgcaaagatggaccgactgagcgggcaaatggaggcagagagtagtgcaatggagcaagccaaaaaggaaatggacgaaggattgaggcagttccagaataggcaagttgcgaacgccctctttgccgttcttagcgctgtagctcagattgggcttgcattccttacggctggtgcaacggctcctggagctgtggcgtcggcggggcaagctgtgagcatagcaggtcaggcggcgcaaggtctgcgaagggtggtggaaattctagagcagctggaggctgtgatggaggttgtggctgctgtgaaggacctcgtggattcattggaacaggtaggtcagattgtggacgcaccggtgatgccagacatgccctcagaggcggactggtccatttttgtgaacgaggtggaggccgtggcagagggcatgccaacggaagtctcggaggttccggtgtggagggccaagtgcaagaatgtggctgcactgggtcgggagatgagcatcacggcagtacagatgtcggagctgcagtatgacatctgggtgcaaggcttgttgcgggatatagctcaaagccacgcagaccggctggcagcgattcaacctgctaatcttaccaactatttggagatggctacccagatggatatgcggactacgaggatgctgctggggctcctcaacatattgcgcatccagaatgcggcgctcaggtacgagtatcttctaatgcccacggagctcacaacatggccactgggtatggatactgtggccaacttgctcatcacgcacgagagtgctgcactgtcaggattagctcagttagggcccccatcggacttcacgagcaggcatgtagtgaaaggcatacctgtgagcttgcttctagacggtggggattgggaatttgagattcctgtgcaaggtggcatgtccagtttcccttccagctggactcgagtgcggattcggcacctggagatgcactttgtgcaggaggccagcggtattggcggtgagattatccaccagcctaccacccagactgggaccgtttacatccttctgcagggttccactaccttccatgaccgcagaagagaccaggtgttgccttttcaggccgctgctccgctcaactaccattacgcgtaccgcctcgacaccggcgactccactctcacaaacgaaccctctgaacagtttgccaacaagttcatgcagatgacacccttcacccgttggaggcttcgtctgtctgcgtccgcagcggagaataaaggattagcctttcccacagctacagctcccgactccaccactgagattgccatcactttccatgttacggccatcagacaaattgactggcggcacgacgaagagtagc

SEQ ID NO: 489 - DNA, 2605 bp, synthetic construct
  misc_feature 1..2605: note = Synthetic
  source 1..2605: mol_type = other DNA
atggctctcgtggattacggcaagcttttcgaggatctgaaccagataagcatgggtgtactggatcgggtagagttttcagaggtgatggtgatccacaggatgtatgtgaggctagctgatctgaatgtggggcagctcgagggagccgagaaagtgaagcggttgtatgtgtttgcggacgtggtggagctaccagtcgtggaatggcggtggccgccgcaaataccaggatcggtgacggtgatcatattgtgtcgtcttcttcaatggccaactgatgggaggcagtcggacaccgagctccacctgacattcatgaagttgcatgccatacaacgagaggaaaatcggtgggagataaccgcagcagatggcatgaactggggagtttacatacacgcagaggaagtacaggttggcgtgctgacaatgtcatggtcttcggtacttagagtttcggcacttcgctctgttataacctccggctttcgcgccgttagtgtgtttgaggtaccgggaagtgtaaggtccacccttggagctactttaaggcccgatcacgccttatatagtacaactatgcaagccacacccaacgcatcgcatattagtgcttttaaccttcgcatagtttccccgtcggcatatcgtgtttgtcctctccaaaatgacacagatacctacttaggtattccagcagacgtggcggcagttcttccagtagacgtggtgactgatcctaacatcttgctgggcatgcagacaacggtacacattgcggagctagtcaaggcatgtcatccgtcacccgatgttgtgagcgctgtaggggagcacctgaactggctcaacaaactcttactcccacttaaggaatcgactcagttgcaaggaagcgagtcgtacaaggagtgccttgcactcttgggtcgtgttcacgctgcgatgaagatggtgagaattggcttagtagtgccccagctgcaatacagaatgtacggtagcctcatcaaccaaatggcccaagtagcacaaaactacgaccgagaattcaagcaattcaaattattcatcatccaaaatcaaatccttggcagctatttgctgcagcagaacagggcatttgctgagagggagctgcagatggagagctttcattcagcggtcatttctcaaagaaggcaggagttggacgacgccatcgctaagatggaccgactgagcttgcagatggaggaagaggacagagcaatggagcaagcccgaaaagaaatggaagaaggattgaagcagttccagaatgagcaagttgcaagggctgtgttcgctgttcttaaatctgtagctatgattgcgctcgcattcgtcacggctggtgcaacggctcctggagctgtggcgtcggcggggcaagctgtgagcatagcaggtcaggcggcgcaaggtctgcgaagggtggtggaaattctagaggggctcgaggctgtgatggaggttgtggctgctgtgaaggacctcgtggattcattggaacaggtaggtcagattgtggatgcaccacctatgccagacatgccctcggaggcggactggtccatttttgtgaacgaggtggaggccgtggcagagggcatgccaacggaagtctcggaggttccggcgtggaaggccaagtgcaagaatgtggctgcactgggtagggagatgtgcatcacggcagaacagatttcccagctccagtatgacatctgggtgcaaggcatgatgcgggatatggctcgaagccaggcagacaggctggccgcaattcaacccgcggaccttaccaactatttggagatggcaatacagatggatatgcggactacgaggatgctgctggggctcctcaacatattgcgcatccagaatgcggcgctcaggtacgagtatcttctaatgcccacggagctcacaacatggccgctgagaatggatactgtggccaacttgctcatcacgcacgagagtgctgcactgtcaggattagctcagttagggcccccatcggacttcacgagcaggcatgtggtgaaagacatacctgtgaacttgctgctcgatggcgaggattgggagtttgagattcctgtgcaaggtggcatgtccagtttcccttccagctggtctcgcgtccgtattcggcacctggagatgcactttgtgaaggaggccagcggtattggtggcgagattatccaccagcctgccacccagactgggaccgtttacatccttctgcagggctccactgtcttccatgaccgcagaagggaggaggtgatgacctttcaggcagcggttccgctcaactaccattacgcgtaccgcctcgacaccggcgactccactctcacaaacgaaccctctgaacagtttgccaacaagttcatgcagatgacacccttcacccgttggaggcttcgtctgtctgcgtccgcaaaggagaatgcaggattagcctttcccacagctacagctcccgactccaccactgagattgccatcactttccatgttacggccattagacaaattgactggcggcacgacgaagagtagc

SEQ ID NO: 490 - DNA, 2602 bp, synthetic construct
  misc_feature 1..2602: note = Synthetic
  source 1..2602: mol_type = other DNA
atggctctcgtggattacggcaagcttttcgaggatctgaaccagataagcatgggtgtactggatcgggtagagttttcagaggtgatggtgatccacaggatgtatgtgaggctagctgatctgaatgtggggcagctcgagggagccgagaaagtgaagcggttgtatgtgtttgcggacgtggtggagctaccagtcgtggaatggcggtggccgccgcaaataccaggatcggtgacggtgatcatattgtgtcgtcttcttcaatggccaactgatgggaggcagtcggacaccgagctccacctgacattcatgaagttgcatgccatacaacgagaggaaaatcggtgggagataaccgcagcagatggcatgaactggggagtttacatacacgcagaggaagtacaggttggcgtgctgacaatgtcatggtcttcggtacttagagtttcggcacttcgctctgttataacctccggctttcgcgccgttagtgtgtttgaggtaccgggaagtgtaaggtccacccttggagctactttaaggcccgatcacgccttatatagtacaactatgcaagccacacccaacgcatcgcatattagtgcttttaaccttcgcatagtttccccgtcggcatatcgtgtttgtcctctccaaaatgacacagatacctacttaggtattccagcagacgtggcggcagttcttccagtagacgtggtgactgatcctaacatcttgctgggcatgcagacaacggtacacattgcggagctagtcaaggcatgtcatccgtcacccgatgttgtgagcgctgtaggggagcacctgaactggctcaacaaactcttactcccacttaaggaatcgactcagttgcaaggaagcgagtcgtacaaggagtgccttgcactcttgggtcgtgttcacgctgcgatgaagatggtgagaattggcttagtagtgccccagctgcaatacagaatgtacggtagcctcatcaaccaaatggcccaagtagcacaaaactacgaccgagaattcaagcaattcaaattattcatcatccaaaatcaaatccttggcagctatttgctgcagcagaacagggcatttgctgagagggagctgcagatggagagctttcatgctgctgtcatttctcaaagaagggaggagttggacgacgccatcgctaagatggaccgactgagcttgcagatggaggaagaggacagagcaatggagcaagccaaaaaggaaatggacgaaggattgaggcagttccagaataggcaagttgcgaacgccctctttgccgttcttagcgctgtagctcagattgggctcgcattcgtcacggctggtgcaacggctcctggagctgtggcgtcggcggggcaagctgtgagcatagcaggtcaggcggcgcaaggtctgcgaagggtggtggaaattctagaggggctcgaggctgtgatggaggttgtggctgctgtgaaggacctcgtggattcattggaacaggtaggtcagattgtggacgcaccggtgatgccggaattgccctcagaggcggactggtccatttttgtgaacgaggtggaggccgtggcagagggcatgccaacggaagtctcggaggttccggtgtggagggccaagtgcaagaatgtggctgcactgggtcgggagatgtgcatcacggcagaacagatttcccagctccagtatgacatctgggtgcaaggcatgatgcgggatacagctcaaagccacgcagaccggctggcagcgattcaacccgcggaccttaccaactatttggagatggctacccagatggatatgcggactacgaggatgctgctggggctcctcaacatattgcgcatccagaatgcggcgctcaggtacgagtatcttctaatgcccacggagctcacaacatggccactgggtatggataccgtgggtgacttgctcatcgcgcacgagagtgctgcactgtcaggattagctcagttagggcccccatcggacttcacgagcaggcatgtggtgaaagacatacctgtgagcttgctgctcgatggcgaggattgggagtttgagattcctgtgcaagctggcatgtccagcttcccttccagctggtctcgcgtccgtattcggcacctggagatgcactttgtgaaggaggccagcggtggcggcgagattatccaccagcctaccacccagactgggaccgtttacatccttctgcagggctccactgtcttccatgaccgcagaagagaccaggtgttgccttttcaggccgctgctccgctcaactaccattacgcgtaccgcctcgacaccggcgactccactctcacaaacgaaccctctgaacagtttgccaacaagttcatgcagatgacacccttcacccgttggaggcttcgtctgtctgcgtccgcgaaagagaatgcaggattagcctttcccacagctacagctcccgactccaccactgagattgccatcactttccatgttacggccatcagacaaattgactggcggcacgacgaagagtagc

SEQ ID NO: 491 - DNA, 2598 bp, synthetic construct
  misc_feature 1..2598: note = Synthetic
  source 1..2598: mol_type = other DNA
atggctctcgtggattacggcaagcttttcgaggatctgaaccagataagcatgggtgtactggatcgggtagagttttcagaggtgatggtgatccacaggatgtatgtgaggctagctgatctgaatgtggggcagctcgagggagccgagaaagtgaagcggttgtatgtgtttgcggacgtggtggagctaccagtcgtggaatggcggtggccgccgcaaataccaggatcggtgacggtgatcatattgtgtcgtcttcttcaatggccaactgatgggaggcagtcggacaccgagctccacctgacattcatgaagttgcatgccatacaacgagaggaaaatcggtgggagataaccgcagcagatggcatgaactggggagtttacatacacgcagaggaagtacaggttggcgtgctgacaatgtcatggtcttcggtacttagagtttcggcacttcgctctgttataacctccggctttcgcgccgttagtgtgtttgaggtaccgggaagtgtaaggtccacccttggagctactttaaggcccgatcacgccttatatagtacaactatgcaagccacacccaacgcatcgcatattagtgcttttaaccttcgcatagtttccccgtcggcatatcgtgtttgtcctctccaaaatgacacagatacctacttaggtattccagcagacgtggcggcagttcttccagtagacgtggtgactgatcctaacatcttgctgggcatgcagacaacggtacacattgcggagctagtcaaggcatgtcatccgtcacccgatgttgtgagcgctgtaggggagcacctgaactggctcaacaaactcttactcccacttaaggaatcgactcagttgcaaggaagcgagtcgtacaaggagtgccttgcactcttgggtcgtgttcacgctgcgatgaagatggtgagaattggcttagtagtgccccagctgcaatacagaatgtacggtagcctcatcaaccaaatggcccaagtagcacaaaactacgaccgagaattcaagcaattcaaattattcatcatccaaaatcaaatccttggcagctatttgctgcagcagaacagggcatttgctgagagggagctgcagatggagagctttcattcagcggtcatttctcaaagaaggcaggagttggacgacgccatcgctaagatggaccgactgagcttgcagatggaggaagaggacagagcaatggagcaagcccgaaaagaaatggaagaaggattgaagcagttccagaatgagcaagttgcaagggctgtgttcgctgttcttaaatctgtagctatgattgcgctcgcattcgtcacggctggtgcaacggctcctggagctgtggcgtcggcggggcaagctgtgagcatagcaggtcaggcggcgcaaggtctgcgaagggtggtggaaattctagaggggctcgaggctgtgatggaggttgtggctgctgtgaaggacctcgtggattcattggaacaggtaggtcagattgtggacgcaccggtgatgccggaattgccctcagaggcggactggtccatttttgtgaatgagattgaagccgtggcagaggggatgccgacggaagtctcggaggttccggtgtggagggccaagtgcaagaatgtggctgcactgggtagggagatgtgcatcacggcagaacagatttcccagctccagtatgacatctgggtgcaaggcatgatgcgggatatggctcgaagccaggcagacaggctggccgcaattcaacccgcggaccttaccaactatttggagatggctacccagatggatatgcggactacgaggatgctgctggggctcctcaacatattgcgcatccagaatgcggcgctcaggtacgagtatcttctaatgcccacggagctcacaacatggccactgggtatggataccgtgggtgacttgctcatcgcgcacgagagtgctgcactgtcaggattagctcagttagggcccccatcggacttcacgagcaggcatgtagtgaaaggcatacctgtgagcttgctgctcgatggcgaggattgggagtttgagattcctgtgcaaggtggcatgtccagtttcccttccagctggactcgagtgcggattcggcacctggagatgcactttgtgcaggaggcgagcggtggcggcgagattatccaccagcctaccacccagacggggaccatttacatcctcctgcagggctccactgtcttccatgatcgcagaagagaccaggtgttgccttttcaggccgctgctccgctcaactaccattacgcgtaccgcctcgacactggagaagccactctcacaaacgaaccctctgaacagtttgccaacaagttcatgcagacgacaccgttcactcactggaggctacgtctgtctgcgtccgcagcggagaataaaggattagcctttcccacagctacagctcccgactccaccactgagattgccatcactttccatgttacggccattagacaaattgactggcggcaagaggaggag

SEQ ID NO: 492 - DNA, 2598 bp, synthetic construct
  misc_feature 1..2598: note = Synthetic
  source 1..2598: mol_type = other DNA
atggctctcgtggattacggcaagcttttcgaggatctgaaccagataagcatgggtgtactggatcgggtagagttttcagaggtgatggtgatccacaggatgtatgtgaggctagctgatctgaatgtggggcagctcgagggagccgagaaagtgaagcggttgtatgtgtttgcggacgtggtggagctaccagtcgtggaatggcggtggccgccgcaaataccaggatcggtgacggtgatcatattgtgtcgtcttcttcaatggccaactgatgggaggcagtcggacaccgagctccacctgacattcatgaagttgcatgccatacaacgagaggaaaatcggtgggagataaccgcagcagatggcatgaactggggagtttacatacacgcagaggaagtacaggttggcgtgctgacaatgtcatggtcttcggtacttagagtttcggcacttcgctctgttataacctccggctttcgcgccgttagtgtgtttgaggtaccgggaagtgtaaggtccacccttggagctactttaaggcccgatcacgccttatatagtacaactatgcaagccacacccaacgcatcgcatattagtgcttttaaccttcgcatagtttccccgtcggcatatcgtgtttgtcctctccaaaatgacacagatacctacttaggtattccagcagacgtggcggcagttcttccagtagacgtggtgactgatcctaacatcttgctgggcatgcagacaacggtacacattgcggagctagtcaaggcatgtcatccgtcacccgatgttgtgagcgctgtaggggagcacctgaactggctcaacaaactcttactcccacttaaggaatcgactcagttgcaaggaagcgagtcgtacaaggagtgccttgcactcttgggtcgtgttcacgctgcgatgaagatggtgagaattggcttagtagtgccccagctgcaatacagaatgtacggtagcctcatcaaccaaatggcccaagtagcacaaaactacgaccgagaattcaagcaattcaaattattcatcatccaaaatcaaatccttggcagctatttgctgcagcagaacaaggcctttgctgacagagaggtgcagatggagagctttcatgctgctgtcatttctcaaagaaggcaggagttggacgacgccatcgctaagatggaccgactgagcttgcagatggaggaagaggacagagcaatggagcaagcccgaaaagaaatggaagaaggattgaagcagttccagaatgagcaagttgcaagggctgtgttcgctgttcttaaatctgtagctatgattgcgctcgcattcgtcacggctggtgcaacggctcctggagctgtggcgtcggcggggcaagctgtgagcatagcaggtcaggcggcgcaaggtctgcgaagggtggtggaaattctagagcagctggaggctgtgatggaggttgtggctgctgtgaaggacctcgtggattcattggaacaggtaggtcagattgtggacgcaccggtgatgccggaattgccctcagaggcggactggtccatttttgtgaacgaggtggaggccgtggcagagggcatgccaacggaagtctcggaggttccggtgtggagggccaagtgcaagaatgtggctgcactgggtagggagatgtgcatcacggcagaacagatttcccagctccagtatgacatctgggtgcaaggcttgttgcgggatatagctcgaagccaggcagacaggctggccgcaattcaacccgcggaccttaccaactatttggagatggcaatacagatggatatgcggactacgaggatactgatagggctcctcaacataatgcgcatccagaatgcggcacttatgtatgagtaccttctaacgcccacgcagctcactgcatggccgctgagaatggatactgtggccaacttgctcatcacgcacgagagtgctgcactgtcaggattagctcagttagggcccccatcggacttcacgagcaggcatgtagtgaaaggcatacctgtgagcttgcttctagacggtggggattgggaatttgagattcctgtgcaaggtggcatgtccagtttcccttccagctggtctcgcgtccgtattcggcacctggagatgcactttgtgcaggaggcgagcggtggcggcgagattatccaccagcctgccacccagacggggaccatttacatccttctgcagggttccactatcttccatgaccgcagaagagaccaggtgttgccttttcaggccgctgctccgctcaactaccattacgcgtaccgcctcgacaccggcgactccactctcacaaacgaaccctctgaacagtttgccaacaagttcatgcagatgacacccttcacccgttggaggcttcgtctgtctgcgtccgcagcggagaataaaggattagcctttcccacagctacagctcccgactccaccactgagattgccatcactttccatgttacggccattagacaaattgactggcggcaagaggaggag

SEQ ID NO: 493 - DNA, 2602 bp, synthetic construct
  misc_feature 1..2602: note = Synthetic
  source 1..2602: mol_type = other DNA
atggctctcgtggattacggcaagcttttcgaggatctgaaccagataagcatgggtgtactggatcgggtagagttttcagaggtgatggtgatccacaggatgtatgtgaggctagctgatctgaatgtggggcagctcgagggagccgagaaagtgaagcggttgtatgtgtttgcggacgtggtggagctaccagtcgtggaatggcggtggccgccgcaaataccaggatcggtgacggtgatcatattgtgtcgtcttcttcaatggccaactgatgggaggcagtcggacaccgagctccacctgacattcatgaagttgcatgccatacaacgagaggaaaatcggtgggagataaccgcagcagatggcatgaactggggagtttacatacacgcagaggaagtacaggttggcgtgctgacaatgtcatggtcttcggtacttagagtttcggcacttcgctctgttataacctccggctttcgcgccgttagtgtgtttgaggtaccgggaagtgtaaggtccacccttggagctactttaaggcccgatcacgccttatatagtacaactatgcaagccacacccaacgcatcgcatattagtgcttttaaccttcgcatagtttccccgtcggcatatcgtgtttgtcctctccaaaatgacacagatacctacttaggtattccagcagacgtggcggcagttcttccagtagacgtggtgactgatcctaacatcttgctgggcatgcagacaacggtacacattgcggagctagtcaaggcatgtcatccgtcacccgatgttgtgagcgctgtaggggagcacctgaactggctcaacaaactcttactcccacttaaggaatcgactcagttgcaaggaagcgagtcgtacaaggagtgccttgcactcttgggtcgtgttcacgctgcgatgaagatggtgagaattggcttagtagtgccccagctgcaatacagaatgtacggtagcctcatcaaccaaatggcccaagtagcacaaaactacgaccgagaattcaagcaattcaaattattcatcatccaaaatcaaatccttggcagctatttgctgcagcagaacagggcatttgctgagagggagctgcagatggagagctttcattcagcggtcatttctcaaagaaggcaggagttggacgacgccatcgctaagatggaccgactgagcttgcagatggaggcagagagtagtgcaatggagcaagccaaaaaggaaatggacgaaggattgaggcagttccagaataggcaagttgcaagggctgtgttcgctgttcttaaatctgtagctatgattgcgctcgcattcgtcacggctggtgcaacggctcctggagctgtggcgtcggcggggcaagctgtgagcatagcaggtcaggcggcacaagctctgcgaagggtggtggaaattctagagcagctggaggctgtgatggaggttgtggctgctgtgaaggacctcgtggattcattggaacaggtaggtcagattgtggacgcaccggtgatgccggaattgccctcagaggcggactggtccatttttgtgaacgaggtggaggccgtggcagagggcatgccaacggaagtctcggaggttccggcgtggaaggccaagtgcaagaatgtggctgcactgggtcgggagatgagcatcacggcagtacagatgtcggagctgcagtatgacatctgggtgcaaggcatgatgcgggatatggctcgaagccaggcagacaggctggccgcaattcaacccgcggaccttaccaactatttggagatggctacccagatggatatgcggactacgaggatgctgctggggctcctcaacatattgcgcatccagaatgcggcgctcaggtacgagtatcttctaatgcccacggagctcacaacatggccactgggtatggataccgtgggtgacttgctcatcgcgcaggagaatgctgcactgataggattaatgcagctagggccctcatctgatttcacgagcaggcatgtagtgaaaggcatacctgtgagcttgcttctagacggtggggattgggaatttgagattcctgtgcaaggtggcatgtccagtttcccttccagctggtctcgcgtccgtattcggcacctggagatgcactttgtgcaggaggcgagcggtggcggcgagattatccaccagcctgccacccagacggggaccatttacatccttctgcagggttccactatcttccatgaccgcagaagagaccaggtgttgccttttcaggccgctgctccgctcaactaccattacgcgtaccgcctcgacactggagaagccactcttacgaacgagccctcggaacagtttgccaacacattcatgcagatgacaccgttcactcactggaggcttcgtctgtctgcgtccgcaaaagagaatgcaggattagcctttcccacggctacagcacttgactccactacccagattgtcatcactttccatgttacggccgttagacaaattgactggcggcacgacgaagagtagc

SEQ ID NO: 494 - DNA, 2601 bp, synthetic construct
  misc_feature 1..2601: note = Synthetic
  source 1..2601: mol_type = other DNA
atggctctcgtggattacggcaagcttttcgaggatctgaaccagataagcatgggtgtactggatcgggtagagttttcagaggtgatggtgatccacaggatgtatgtgaggctagctgatctgaatgtggggcagctcgagggagccgagaaagtgaagcggttgtatgtgtttgcggacgtggtggagctaccagtcgtggaatggcggtggccgccgcaaataccaggatcggtgacggtgatcatattgtgtcgtcttcttcaatggccaactgatgggaggcagtcggacaccgagctccacctgacattcatgaagttgcatgccatacaacgagaggaaaatcggtgggagataaccgcagcagatggcatgaactggggagtttacatacacgcagaggaagtacaggttggcgtgctgacaatgtcatggtcttcggtacttagagtttcggcacttcgctctgttataacctccggctttcgcgccgttagtgtgtttgaggtaccgggaagtgtaaggtccacccttggagctactttaaggcccgatcacgccttatatagtacaactatgcaagccacacccaacgcatcgcatattagtgcttttaaccttcgcatagtttccccgtcggcatatcgtgtttgtcctctccaaaatgacacagatacctacttaggtattccagcagacgtggcggcagttcttccagtagacgtggtgactgatcctaacatcttgctgggcatgcagacaacggtacacattgcggagctagtcaaggcatgtcatccgtcacccgatgttgtgagcgctgtaggggagcacctgaactggctcaacaaactcttactcccacttaaggaatcgactcagttgcaaggaagcgagtcgtacaaggagtgccttgcactcttgggtcgtgttcacgctgcgatgaagatggtgagaattggcttagtagtgccccagctgcaatacagaatgtacggtagcctcatcaaccaaatggcccaagtagcacaaaactacgaccgagaattcaagcaattcaaattattcatcatccaaaatcaaatccttggcagctatttgctgcagcagaacagggcatttgctgacagagaggtgcagatggagagctttcattcagcggtcatttctcaaagaagggaggagttggacaatacattcgcaaagatggaccgattgagcgggcaaatggaggcagagagtagtgcaatggagcaagccaaaaaggaaatggacgaaggattgaggcagttccagaataggcaagttgcgaacgccctctttgccgttcttagcgctgtagctcagattgggcttgcattccttacggctggtgcaacggctcctggagctgtggcgtcggcggggcaagctgtgagcatagcaggtcaggcggcgcaaggtctgcgaagggtggtggaaattctagagcagctggaggctgtgatggaggttgtggctgctgtgaaggacctcgtggattcattggaacaggtaggtcagattgtggacgcaccggtgatgccggaattgccctcagaggcggactggtccatttttgtgaacgaggtggaggccgtggcagagggcatgccaacggaagtctcggaggttccggtgtggagggccaagtgcaagaatgtggctgcactgggtcgggagatgagcatcacggcagtacagatgtcggagctgcagtatgtcatctgggtgcaaggcatgatgcgggatatggctcgaagccaggcagacaggctggccgcaattcaacccgcggaccttaccaactatttggagatggctacccagatggatatgcggactacgaggatgctgctggggctcctcaacatattgcgcatccagaatgcggcacttatgtatgagtaccttctaacgcccacgcagctcactgcatggccgctgagaatggatactgtggccaacttgctcatcacgcacgagagtgctgcactgtcaggattagctcagttagggcccccatcggacttcacgagcaggcatgtagtgaaaggcatacctgtgagcttgcttctagacggtggggattgggaatttgagattcctgtgcaaggtggcatgtccagcttcccttccagctggtctcgcgtccgtattcggcacctggagatgcactttgtgaaggaggcgagcggtattggtggtgagattatccaccagcctgccacccagactgggaccatttacatcctcctgcagggctccactgtcttccatgatcgcagaagagaccaggtgttgccttttcaggccgctgctccgctcaactaccattacgcgtaccgcctcgacaccggcgactccactctcacaaacgaaccctctgaacagtttgccaacacattcatgcagatgacaccgttcactcactggaggctacgtctgtctgcgtccgcagcggagaataaaggattagcctttcccacagctacagctcccgactccaccactgagattgccatcactttccatgttacggccatcagacaaattgactggcggcaagaggaggag

SEQ ID NO: 495 - DNA, 2602 bp, synthetic construct
  misc_feature 1..2602: note = Synthetic
  source 1..2602: mol_type = other DNA
atggctctcgtggattacggcaagcttttcgaggatctgaaccagataagcatgggtgtactggatcgggtagagttttcagaggtgatggtgatccacaggatgtatgtgaggctagctgatctgaatgtggggcagctcgagggagccgagaaagtgaagcggttgtatgtgtttgcggacgtggtggagctaccagtcgtggaatggcggtggccgccgcaaataccaggatcggtgacggtgatcatattgtgtcgtcttcttcaatggccaactgatgggaggcagtcggacaccgagctccacctgacattcatgaagttgcatgccatacaacgagaggaaaatcggtgggagataaccgcagcagatggcatgaactggggagtttacatacacgcagaggaagtacaggttggcgtgctgacaatgtcatggtcttcggtacttagagtttcggcacttcgctctgttataacctccggctttcgcgccgttagtgtgtttgaggtaccgggaagtgtaaggtccacccttggagctactttaaggcccgatcacgccttatatagtacaactatgcaagccacacccaacgcatcgcatattagtgcttttaaccttcgcatagtttccccgtcggcatatcgtgtttgtcctctccaaaatgacacagatacctacttaggtattccagcagacgtggcggcagttcttccagtagacgtggtgactgatcctaacatcttgctgggcatgcagacaacggtacacattgcggagctagtcaaggcatgtcatccgtcacccgatgttgtgagcgctgtaggggagcacctgaactggctcaacaaactcttactcccacttaaggaatcgactcagttgcaaggaagcgagtcgtacaaggagtgccttgcactcttgggtcgtgttcacgctgcgatgaagatggtgagaattggcttagtagtgccccagctgcaatacagaatgtacggtagcctcatcaaccaaatggcccaagtagcacaaaactacgaccgagaattcaagcaattcaaattattcatcatccaaaatcaaatccttggcagctatttgctgcagcagaacagggcatttgctgagagggagctgcagatggagagctttcatgctgctgtcatttctcaaagaaggcaggagttggacgacgccatcgctaagatggaccgactgagcttgcagatggaggaagaggacagagcaatggagcaagcccgaaaagaaatggaagaaggattgaagcagttccagaatgagcaagttgcaagggctgtgttcgctgttcttaaatctgtagctatgattgcgctcgcattcgtcacggctggtgcaacggctcctggggctgcagcatctgcagcgcaagctgtgagcatagcaggtcaggcggcgcaaggtctgcgaagggtggtggaaattctagaggggctggaggctgtgatggaggttgtggctgctgtgaaggacctcgtggattcattggaacaggtaggtcagattgtggacgcaccggtgatgccggaattgccctcagaggcggactggtccatttttgtgaacgaggtggaggccgtggcagagggcatgccaacggaagtctcggaggttccggtgtggagggccaagtgcaagaatgtggctgcactgggtagggagatgtgcatcacggcagtacagatgtcggagctgcagtatgacatctgggtgcaaggcatgatgcgggatatggctcgaagccaggcagacaggctggccgcaattcaacccgcggaccttaccaactatttggagatggctacccagatggatatgcggactacgaggatgctgctggggctcctcaacatattgcgcatccagaatgcggcgctcaggtacgagtatcttctaatgcccacggagctcacaacatggccactgggtatggataccgtgggtgacttgctcatcgcgcaggagaatgctgcactgataggattaatgcagctagggccctcatctgatttcacgagcaggcatgtagtgaaaggcatacctgtgagcttgcttctagacggtggggattgggaatttgagattcctgtgcaaggtggcatgtccagtttcccttccagctggtctcgagtgcggattcggcacctggagatgcactttgtgcaggaggcgagcggtggcggcgagattatccaccagcctgccacccagacggggaccatttacatcctcctgcagggctccactgtcttccatgatcgcagaagggaggaggtgatgacctttcaggcagcggttccgctcaactaccattacgcgtaccgcctcgacactggagaagccactctcacaaacgaaccctctgaacagtttgccaacacattcatgcagatgacaccgttcactcactggaggctacgtctgtctgcgtccgcaaaagagaatgcaggattagcctttcccacagctacagctcccgactccaccactgagattgccatcactttccatgttacggccattagacaaattgactggcggcacgacgaagagtagc

SEQ ID NO: 496 - DNA, 2598 bp, synthetic construct
  misc_feature 1..2598: note = Synthetic
  source 1..2598: mol_type = other DNA
atggctctcgtggattacggcaagcttttcgaggatctgaaccagataagcatgggtgtactggatcgggtagagttttcagaggtgatggtgatccacaggatgtatgtgaggctagctgatctgaatgtggggcagctcgagggagccgagaaagtgaagcggttgtatgtgtttgcggacgtggtggagctaccagtcgtggaatggcggtggccgccgcaaataccaggatcggtgacggtgatcatattgtgtcgtcttcttcaatggccaactgatgggaggcagtcggacaccgagctccacctgacattcatgaagttgcatgccatacaacgagaggaaaatcggtgggagataaccgcagcagatggcatgaactggggagtttacatacacgcagaggaagtacaggttggcgtgctgacaatgtcatggtcttcggtacttagagtttcggcacttcgctctgttataacctccggctttcgcgccgttagtgtgtttgaggtaccgggaagtgtaaggtccacccttggagctactttaaggcccgatcacgccttatatagtacaactatgcaagccacacccaacgcatcgcatattagtgcttttaaccttcgcatagtttccccgtcggcatatcgtgtttgtcctctccaaaatgacacagatacctacttaggtattccagcagacgtggcggcagttcttccagtagacgtggtgactgatcctaacatcttgctgggcatgcagacaacggtacacattgcggagctagtcaaggcatgtcatccgtcacccgatgttgtgagcgctgtaggggagcacctgaactggctcaacaaactcttactcccacttaaggaatcgactcagttgcaaggaagcgagtcgtacaaggagtgccttgcactcttgggtcgtgttcacgctgcgatgaagatggtgagaattggcttagtagtgccccagctgcaatacagaatgtacggtagcctcatcaaccaaatggcccaagtagcacaaaactacgaccgagaattcaagcaattcaaattattcatcatccaaaatcaaatccttggcagctatttgctgcagcagaacagggcatttgctgagagggagctgcagatggagagctttcattcagcggtcatttctcaaagaagggaggagttggacaatacattcgcaaagatggaccgattgagcgggcaaatggaggcagagagtagtgcaatggagcaagccaaaaaggaaatggacgaaggattgaggcagttccagaataggcaagttgcgaacgccctctttgccgttcttagcgctgtagctcagattgggcttgcattccttacggctggtgcaacggctcctggagctgtggcgtcggcggggcaagctgtgagcatagcaggtcaggcggcgcaaggtctgcgaagggtggtggaaattctagaggggctcgaggctgtgatggaggttgtggctgctataaagcaccttgtggatgctctggaccaggtaagtcagattgtggatgcaccacctatgccagacatgccctcggaggcggactggtccatttttgtgaacgaggtggaggccgtggcagagggcatgccaacggaagtctcggaggttccggcgtggaaggccaagtgcaagaatgtggctgcactgggtcgggagatgtgcatcacggcagaacagatttcccagctccagtatgacatctgggtgcaaggcttgttgcgggatatagctcaaagccaggcagacaggctggccgcaattcaacccgcggaccttaccaactatttggagatggctacccagatggatatgcggactacgaggatgctgctggggctcctcaacatattgcgcatccagaatgcggcgctcaggtacgagtaccttctaacgcccacgcagctcactgcatggccgctgagaatggatactgtggccaacttgctcatcacgcacgagagtgctgcactgtcaggattagctcagttagggcccccatcggacttcacgagcaggcatgtggtgaaagacatacctgtgaacttgctgctcgatggcgaggattgggagtttgagattcctgtgcaaggtggcatgtccagtttcccttccagctggactcgagtgcggattcggcacctggagatgcactttgtgcaggaggcgagcggtggcggcgagattatccaccagcctgccacccagacggggaccatttacatcctcctgcagggttccactatcttccatgaccgcagaagggaggaggtgatgacctttcaggcagcggttccgctcaactaccattacgcgtaccgcctcgacaccggcgactccactctcacaaacgaaccctctgaacagtttgccaacacattcatgcagatgacacccttcacccgttggaggcttcgtctgtctgcgtccgcaaaagagaatgcaggattagcctttcccacagctacagctcccgactccaccactgagattgccatcactttccatgttacggccatcagacaaattgactggcggcaagaggaggag

SEQ ID NO: 497 - DNA, 2601 bp, synthetic construct
  misc_feature 1..2601: note = Synthetic
  source 1..2601: mol_type = other DNA
atggctctcgtggattacggcaagcttttcgaggatctgaaccagataagcatgggtgtactggatcgggtagagttttcagaggtgatggtgatccacaggatgtatgtgaggctagctgatctgaatgtggggcagctcgagggagccgagaaagtgaagcggttgtatgtgtttgcggacgtggtggagctaccagtcgtggaatggcggtggccgccgcaaataccaggatcggtgacggtgatcatattgtgtcgtcttcttcaatggccaactgatgggaggcagtcggacaccgagctccacctgacattcatgaagttgcatgccatacaacgagaggaaaatcggtgggagataaccgcagcagatggcatgaactggggagtttacatacacgcagaggaagtacaggttggcgtgctgacaatgtcatggtcttcggtacttagagtttcggcacttcgctctgttataacctccggctttcgcgccgttagtgtgtttgaggtaccgggaagtgtaaggtccacccttggagctactttaaggcccgatcacgccttatatagtacaactatgcaagccacacccaacgcatcgcatattagtgcttttaaccttcgcatagtttccccgtcggcatatcgtgtttgtcctctccaaaatgacacagatacctacttaggtattccagcagacgtggcggcagttcttccagtagacgtggtgactgatcctaacatcttgctgggcatgcagacaacggtacacattgcggagctagtcaaggcatgtcatccgtcacccgatgttgtgagcgctgtaggggagcacctgaactggctcaacaaactcttactcccacttaaggaatcgactcagttgcaaggaagcgagtcgtacaaggagtgccttgcactcttgggtcgtgttcacgctgcgatgaagatggtgagaattggcttagtagtgccccagctgcaatacagaatgtacggtagcctcatcaaccaaatggcccaagtagcacaaaactacgaccgagaattcaagcaattcaaattattcatcatccaaaatcaaatccttggcagctatttgctgcagcagaacagggcatttgctgagagggagctgcagatggagagctttcatgctgctgtcatttctcaaagaagggaggagttggacaatacattcgcaaagatggaccgattgagcgggcaaatggaggaagaggacagagcaatggagcaagccaaaaaggaaatggacgaaggattgaggcagttccagaataggcaagttgcgaacgccctctttgccgttcttagcgctgtagctcagattgggcttgcattccttacggctggtgcaacggctcctggagctgtggtgtcggcggggcaagctgtgagcatagcaggtcaggcggcgcaaggtctgcgaagggtggtggaaattctagagcagctggaggctgtgatggaggttgtggctgctgtgaaggacctcgtggattcattggaacaggtaggtcagattgtggacgcaccggtgatgccggaattgccctcagaggcggactggtccatttttgtgaacgaggtggaggccgtggcagagggcatgccaacggaagtctcggaggttccggcgtggaaggccaagtgcaagaatgtggctgcactgggtagggagatgtgcatcacggcagaacagatttcccagctccagtatgacatctgggtgcaaggcatgatgcgggatatggctcgaagccaggcagacaggctggccgcaattcaacccgcggaccttaccaactatttggagatggctacccagatggatatgcggactacgaggatgctgctggggctcctcaacataatgcgcatccagaatgcggcgctcaggtacgagtatcttctaatgcccacggagctcacaacatggccactgggtatggataccgtgggtgacttgctcatcgcgcaggagaatgctgcactgataggattaatgcagctagggccctcatctgatttcacgagcaggcatgtggtgaaaggcatacctgtgagcttgcttctagacggtggggattgggaatttgagattcctgtgcaaggtggcatgtccagtttcccttccagctggactcgagtgcggattcggcacctggagatgcactttgtgcaggaggccagcggtattggtggtgagattatccaccagcctaccacccagactgggaccgtttacatccttctgcagggttccactatcttccatgaccgcagaagagaccaggtgttgccttttcaggccgctgctccgctcaactaccattacgcgtaccgcctcgacactggagaagccactcttacgaacgagccctcggaacagtttgccaacacattcatgcagatgacacccttcacccgttggaggcttcgtctgtctgcggccgcaaaagagaatgcaggattagcctttcccacggctacagcacttgactccactacccagattgtcatcactttccatgttacggccattagacaaattgactggcggcacgaggaggag

SEQ ID NO: 498 - DNA, 2598 bp, synthetic construct
  misc_feature 1..2598: note = Synthetic
  source 1..2598: mol_type = other DNA
atggctctcgtggattacggcaagcttttcgaggatctgaaccagataagcatgggtgtactggatcgggtagagttttcagaggtgatggtgatccacaggatgtatgtgaggctagctgatctgaatgtggggcagctcgagggagccgagaaagtgaagcggttgtatgtgtttgcggacgtggtggagctaccagtcgtggaatggcggtggccgccgcaaataccaggatcggtgacggtgatcatattgtgtcgtcttcttcaatggccaactgatgggaggcagtcggacaccgagctccacctgacattcatgaagttgcatgccatacaacgagaggaaaatcggtgggagataaccgcagcagatggcatgaactggggagtttacatacacgcagaggaagtacaggttggcgtgctgacaatgtcatggtcttcggtacttagagtttcggcacttcgctctgttataacctccggctttcgcgccgttagtgtgtttgaggtaccgggaagtgtaaggtccacccttggagctactttaaggcccgatcacgccttatatagtacaactatgcaagccacacccaacgcatcgcatattagtgcttttaaccttcgcatagtttccccgtcggcatatcgtgtttgtcctctccaaaatgacacagatacctacttaggtattccagcagacgtggcggcagttcttccagtagacgtggtgactgatcctaacatcttgctgggcatgcagacaacggtacacattgcggagctagtcaaggcatgtcatccgtcacccgatgttgtgagcgctgtaggggagcacctgaactggctcaacaaactcttactcccacttaaggaatcgactcagttgcaaggaagcgagtcgtacaaggagtgccttgcactcttgggtcgtgttcacgctgcgatgaagatggtgagaattggcttagtagtgccccagctgcaatacagaatgtacggtagcctcatcaaccaaatggcccaagtagcacaaaactacgaccgagaattcaagcaattcaaattattcatcatccaaaatcaaatccttggcagctatttgctgcagcagaacagggcatttgctgagagggagctgcagatggagagctttcatgctgctgtcatttctcaaagaagggaggagttggacaatacattcgcaaagatggaccgattgagcgggcaaatggaggcagagagtagtgcaatggagcaagccaaaaaggaaatggacgaaggattgaggcagttccagaataggcaagttgcgaacgccctctttgccgttcttagcgctgtagctcagattgggcttgcattccttacggctggtgcaacggctcctggggctgtggcgtcggcggggcaagctgtgagcatagcaggtcaggcggcgcaaggtctgcgaagggtggtggaaattctagaggggctcgaggctgtgatggaggttgtggctgctgtgaaggacctcgtggattcattggaacaggtaggtcagattgtggacgcaccggtgatgccggaattgccctcagaggcggactggagtatttttgtgaatgagattgaagccgtggcagaggggatgccgacggaagtctcggaggttccggcgtggagggccaagtgcaagaatgtggctgcactgggtagggagatgagcatcacggcagtacagatgtcggagctgcagtatgacatctgggtgcaaggcatgatgcgggatatggctcgaagccaggcagacaggctggccgcaattcaacccgcggaccttaccaactatttggagatggcaatacagatggatatgcggactacgaggatgctgctggggctcctcaacatattgcgcatccagaatgcggcgctcaggtacgagtatcttctaatgcccacggagctcacaacatggccactgggtatggataccgtgggtgacttgctcatcgcgcaggagaatgctgcactgataggattagctcagttagggcccccatcggacttcacgagcaggcatgtagtgaaaggcatacctgtgagcttgcttctagacggtggggattgggaatttgagattcctgtgcaaggtggcatgtccagcttcccttccagctggtctcgcgtccgtattcggcacctggagatgcactttgtgcaggaggcgagcggtggcggcgagattatccaccagcctgccacccagacggggaccatttacatcctcctgcagggctccactgtcttccatgatcgcagaagagaccaggtgttgccttttcaggccgctgctccgctcaactaccattacgcgtaccgcctcgacactggagaagccactcttacgaacgagccctcggaacagtttgccaacaagttcatgcagatgacacccttcactcactggaggctacgtctgtctgcgtccgcagcggagaataaaggattagcctttcccacagctacagctcccgactccaccactgagattgtcatcactttccatgttacggccattagacaaattgactggcggcaagaggaggag

SEQ ID NO: 499 - DNA, 2598 bp, synthetic construct
  misc_feature 1..2598: note = Synthetic
  source 1..2598: mol_type = other DNA
atggctctcgtggattacggcaagcttttcgaggatctgaaccagataagcatgggtgtactggatcgggtagagttttcagaggtgatggtgatccacaggatgtatgtgaggctagctgatctgaatgtggggcagctcgagggagccgagaaagtgaagcggttgtatgtgtttgcggacgtggtggagctaccagtcgtggaatggcggtggccgccgcaaataccaggatcggtgacggtgatcatattgtgtcgtcttcttcaatggccaactgatgggaggcagtcggacaccgagctccacctgacattcatgaagttgcatgccatacaacgagaggaaaatcggtgggagataaccgcagcagatggcatgaactggggagtttacatacacgcagaggaagtacaggttggcgtgctgacaatgtcatggtcttcggtacttagagtttcggcacttcgctctgttataacctccggctttcgcgccgttagtgtgtttgaggtaccgggaagtgtaaggtccacccttggagctactttaaggcccgatcacgccttatatagtacaactatgcaagccacacccaacgcatcgcatattagtgcttttaaccttcgcatagtttccccgtcggcatatcgtgtttgtcctctccaaaatgacacagatacctacttaggtattccagcagacgtggcggcagttcttccagtagacgtggtgactgatcctaacatcttgctgggcatgcagacaacggtacacattgcggagctagtcaaggcatgtcatccgtcacccgatgttgtgagcgctgtaggggagcacctgaactggctcaacaaactcttactcccacttaaggaatcgactcagttgcaaggaagcgagtcgtacaaggagtgccttgcactcttgggtcgtgttcacgctgcgatgaagatggtgagaattggcttagtagtgccccagctgcaatacagaatgtacggtagcctcatcaaccaaatggcccaagtagcacaaaactacgaccgagaattcaagcaattcaaattattcatcatccaaaatcaaatccttggcagctatttgctgcagcagaacagggcatttgctgagagggagctgcagatggagagctttcatgctgctgtcatttctcaaagaagggaggagttggacaatacattcgcaaagatggaccgattgagcgggcaaatggaggcagagagtagtgcaatggagcaagccaaaaaggaaatggacgaaggattgaggcagttccagaataggcaagttgcgaacgccctctttgccgttcttagcgctgtagctcagattgggcttgcattccttacggctggtgcaacggctcctggggctgtggcgtcggcggggcaagctgtgagcatagcaggtcaggcggcgcaaggtctgcgaagggtggtggaaattctagaggggctcgaggctgtgatggaggttgtggctgctataaagcaccttgtggatgctctggaacaggtaggtcagattgtggatgcaccacctatgccagacatgccctcggaggcggactggtccatttttgtgaacgaggtggaggccgtggcagaggggatgccgacggaagtctcggaggttccggcgtggaaggccaagtgcaagaatgtggctgcactgggtcgggagatgagcatcacggcagtacagatgtcggagctgcagtatgacatctgggtgcaaggcttgttgcgggatatagctcgaagccaggcagacaggctggccgcaattcaacccgcggaccttaccaactatttggagatggctacccagatggatatgcggactacgaggatgctgctggggctcctcaacatattgcgcatccagaatgcggcgctcaggtacgagtatcttctaatgcccacggagctcacaacatggccactgggtatggataccgtgggtgacttgctcatcacgcacgagagtgctgcactgtcaggattagctcagttagggcccccatctgatttcacgagcaggcatgtggtgaaaggcatacctgtgagcttgcttctagacggtggggattgggaatttgagattcctgtgcaaggtggcatgtccagcttcccttccagctggactcgcgtccgtattcggcacctggagatgcactttgtgcaggaggcgagcggtggcggcgagattatccaccagcctaccacccagactgggaccgtttacatccttctgcagggttccactgtcttccatgaccgcagaagagaccaggtgttgccttttcaggccgctgctccgctcaactaccattacgcgtaccgcctcgacaccggcgactccactctcacaaacgaaccctctgaacagtttgccaacaagttcatgcagatgacacccttcacccgttggaggcttcgtctgtctgcgtccgcaaaagagaatgcaggattagcctttcccacggctacagctcccgactccactacccagattgtcatcactttccatgttacggccattagacaaattgactggcggcaagaggaggag

SEQ ID NO: 500 - DNA, 2598 bp, synthetic construct
  misc_feature 1..2598: note = Synthetic
  source 1..2598: mol_type = other DNA
atggctctcgtggattacggcaagcttttcgaggatctgaaccagataagcatgggtgtactggatcgggtagagttttcagaggtgatggtgatccacaggatgtatgtgaggctagctgatctgaatgtggggcagctcgagggagccgagaaagtgaagcggttgtatgtgtttgcggacgtggtggagctaccagtcgtggaatggcggtggccgccgcaaataccaggatcggtgacggtgatcatattgtgtcgtcttcttcaatggccaactgatgggaggcagtcggacaccgagctccacctgacattcatgaagttgcatgccatacaacgagaggaaaatcggtgggagataaccgcagcagatggcatgaactggggagtttacatacacgcagaggaagtacaggttggcgtgctgacaatgtcatggtcttcggtacttagagtttcggcacttcgctctgttataacctccggctttcgcgccgttagtgtgtttgaggtaccgggaagtgtaaggtccacccttggagctactttaaggcccgatcacgccttatatagtacaactatgcaagccacacccaacgcatcgcatattagtgcttttaaccttcgcatagtttccccgtcggcatatcgtgtttgtcctctccaaaatgacacagatacctacttaggtattccagcagacgtggcggcagttcttccagtagacgtggtgactgatcctaacatcttgctgggcatgcagacaacggtacacattgcggagctagtcaaggcatgtcatccgtcacccgatgttgtgagcgctgtaggggagcacctgaactggctcaacaaactcttactcccacttaaggaatcgactcagttgcaaggaagcgagtcgtacaaggagtgccttgcactcttgggtcgtgttcacgctgcgatgaagatggtgagaattggcttagtagtgccccagctgcaatacagaatgtacggtagcctcatcaaccaaatggcccaagtagcacaaaactacgaccgagaattcaagcaattcaaattattcatcatccaaaatcaaatccttggcagctatttgctgcagcagaacagggcatttgctgagagggagctgcagatggagagctttcatgctgctgtcatttctcaaagaagggaggagttggacgacgccatcgctaagatggaccgactgagcttgcagatggaggaagaggacagagcaatggagcaagcccgaaaagaaatggaagaaggattgaagcagttccagaatgagcaagttgcaagggctgtgttcgctgttcttaaatctgtagctcagattgggctcgcattcgtcacggctggtgcaacggctcctggagctgtggcgtcggcggggcaagctgtgagcatagcaggtcaggcggcgcaaggtctgcgaagggtggtggaaattctagaggggctcgaggctgtgatggaggttgtggctgctgtgaaggacctcgtggattcattggaacaggtaggtcagattgtggacgcaccggtgatgccggaattgccctcagaggcggactggtccatttttgtgaacgaggtggaggccgtggcagagggcatgccgacggaagtctcggaggttccggcgtggaaggccaagtgcaagaatgtggctgcactgggtcgggagatgagcatcacggcagaacagatgtcggagctgcagtatgacatctgggtgcaaggcatgatgcgggatatggctcgaagccaggcagacaggctggccgcaattcaacccgcggaccttaccaactatttggagatggctacccagatggatatgcggactacgaggatgctgctggggctcctcaacataatgcgcatccagaatgcggcgctcaggtacgagtatcttctaatgcccacggagctcacaacatggccactgggtatggataccgtgggtgacttgctcatcacgcacgagagtgctgcactgtcaggattagctcagttagggcccccatcggacttcacgagcaggcatgtagtgaaaggcatacctgtgagcttgcttctagacggtggggattgggaatttgagattcctgtgcaaggtggcatgtccagcttcccttccagctggtctcgcgtccgtattcggcacctggagatgcactttgtgaaggaggccagcggtggcggcgagattatccaccagcctgccacccagacggggaccatttacatcctcctgcagggttccactatcttccatgaccgcagaagggaggaggtgatgacctttcaggcagcggttccgctcaactaccattacgcgtaccgcctcgacaccggcgactccactctcacaaacgaaccctctgaacagtttgccaacacattcatgcagatgacacccttcacccgttggaggcttcgtctgtctgcgtccgcagcggagaataaaggattagcctttcccacagctacagctcccgactccaccactgagattgtcatcactttccatgttacggccatcagacaaattgactggcggcaagaggaggag

SEQ ID NO: 501 - DNA, 2602 bp, synthetic construct
  misc_feature 1..2602: note = Synthetic
  source 1..2602: mol_type = other DNA
atggctctcgtggattacggcaagcttttcgaggatctgaaccagataagcatgggtgtactggatcgggtagagttttcagaggtgatggtgatccacaggatgtatgtgaggctagctgatctgaatgtggggcagctcgagggagccgagaaagtgaagcggttgtatgtgtttgcggacgtggtggagctaccagtcgtggaatggcggtggccgccgcaaataccaggatcggtgacggtgatcatattgtgtcgtcttcttcaatggccaactgatgggaggcagtcggacaccgagctccacctgacattcatgaagttgcatgccatacaacgagaggaaaatcggtgggagataaccgcagcagatggcatgaactggggagtttacatacacgcagaggaagtacaggttggcgtgctgacaatgtcatggtcttcggtacttagagtttcggcacttcgctctgttataacctccggctttcgcgccgttagtgtgtttgaggtaccgggaagtgtaaggtccacccttggagctactttaaggcccgatcacgccttatatagtacaactatgcaagccacacccaacgcatcgcatattagtgcttttaaccttcgcatagtttccccgtcggcatatcgtgtttgtcctctccaaaatgacacagatacctacttaggtattccagcagacgtggcggcagttcttccagtagacgtggtgactgatcctaacatcttgctgggcatgcagacaacggtacacattgcggagctagtcaaggcatgtcatccgtcacccgatgttgtgagcgctgtaggggagcacctgaactggctcaacaaactcttactcccacttaaggaatcgactcagttgcaaggaagcgagtcgtacaaggagtgccttgcactcttgggtcgtgttcacgctgcgatgaagatggtgagaattggcttagtagtgccccagctgcaatacagaatgtacggtagcctcatcagacaaatggcccaagtagcacaaaactacgaccgagaattcaagcaattcaaattattcatcatccaaaatcaaatccttggcagctatttgctgcagcagaacagggcatttgctgagagggagctgcagatggagagctttcatgctgctgtcatttctcaaagaaggcaggagttggacgacgccatcgctaagatggaccgactgagcttgcagatggaggaagaggacagagcaatggagcaagcccgaaaggaaatggacgaaggattgaggcagttccagaataggcaagttgcgaacgccctctttgccgttcttagcgctgtagctcagattgggcttgcattccttacggctggtgcaacggctcctggagctgtggcgtcggcggggcaagctgtgagcatagcaggtcaggcggcgcaaggtctgcgaagggtggtggaaattctagagcagctggaggctgtgatggaggttgtggctgctgtgaaggacctcgtggattcattggaacaggtaggtcagattgtggacgcaccggtgatgccggaattgccctcagaggcggactggtccatttttgtgaatgagattgaagccgtggcagaggggatgccaacggaagtctcggaggttccggtgtggagggccaagtgcaagaatgtggctgcactgggtcgggagatgtgcatcacggcagtacagatgtcggagctgcagtatgacatctgggtgcaaggcttgttgcgggatatggctcgaagccaggcagacaggctggccgcaattcaacccgcggaccttaccaactatttggagatggctacccagatggatatgcggactacgaggatgctgctggggctcctcaacatattgcgcatccagaatgcggcgctcaggtacgagtatcttctaatgcccacgcagctcactgcatggccgctgagaatggatactgtggccaacttgctcatcacgcacgagagtgctgcactgtcaggattagctcagttagggcccccatcggacttcacgagcaggcatgtagtgaaaggcatacctgtgagcttgcttctagacggtggggattgggaatttgagattcctgtgcaaggtggcatgtccagtttcccttccagctggactcgagtgcggattcggcacctggagatgcactttgtgcaggaggcgagcggtggcggcgagattatccaccagcctaccacccagactgggaccgtttacatccttctgcagggttccactatcttccatgaccgcagaagagaccaggtgttgccttttcaggccgctgctccgctcaactaccattacgcgtaccgcctcgacaccggcgactccactctcacaaacgaaccctctgaacagtttgccaacaagttcatgcagatgacacccttcacccgttggaggcttcgtctgtctgcgtccgcaaaagagaatgcaggattagcctttcccacggctacagcacttgactccactacccagattgtcatcactttccatgttacggccatcagacaaattgactggcggcacgacgaagagtagc

SEQ ID NO: 502 - DNA, 2601 bp, synthetic construct
  misc_feature 1..2601: note = Synthetic
  source 1..2601: mol_type = other DNA
atggctctcgtggattacggcaagcttttcgaggatctgaaccagataagcatgggtgtactggatcgggtagagttttcagaggtgatggtgatccacaggatgtatgtgaggctagctgatctgaatgtggggcagctcgagggagccgagaaagtgaagcggttgtatgtgtttgcggacgtggtggagctaccagtcgtggaatggcggtggccgccgcaaataccaggatcggtgacggtgatcatattgtgtcgtcttcttcaatggccaactgatgggaggcagtcggacaccgagctccacctgacattcatgaagttgcatgccatacaacgagaggaaaatcggtgggagataaccgcagcagatggcatgaactggggagtttacatacacgcagaggaagtacaggttggcgtgctgacaatgtcatggtcttcggtacttagagtttcggcacttcgctctgttataacctccgactttcgcgccgttagtgtgtttgaggtaccgggaagtgtaaggtccacccttggagctactttaaggcccgatcacgccttatatagtacaactatgcaagccacacccaacgcatcgcatattagtgcttttaaccttcgcatagtttccccgtcggcatatcgtgtttgtcctctccaaaatgacacagatacctacttaggtattccagcagacgtggcggcagttcttccagtagacgtggtgactgatcctaacatcttgctgggcatgcagacaacggtacacattgcggagctagtcaaggcatgtcatccgtcacccgatgttgtgagcgctgtaggggagcacctgaactggctcaacaaactcttactcccacttaaggaatcgactcagttgcaaggaagcgagtcgtacaaggagtgccttgcactcttgggtcgtgttcacgctgcgatgaagatggtgagaattggcttagtagtgccccagctgcaatacagaatgtacggtagcctcatcaaccaaatggcccaagtagcacaaaactacgaccgagaattcaagcaattcaaattattcatcatccaaaatcaaatccttggcagctatttgctgcagcagaacagggcatttgctgagagggaggtgcagatggagagctttcattcagcggtcatttctcaaagaaggcaggagttggacaatacattcgcaaagatggaccgactgagcttgcagatggaggaagaggacagagcaatggagcaagcccgaaaagaaatggaagaaggattgaagcagttccagaatgagcaagttgcaagggctgtgttcgctgttcttaaatctgtagctatgattgcgctcgcattcgtcacggctggtgcaacggctcctggagctgtggcgtcggcggggcaagctgtgagcatagcaggtcaggcggcacaagctctgcgaagggtggtggaaattctagaggggctcgaggctgtgatggaggttgtggctgctgtgaaggacctcgtggattcattggaacaggtaggtcagattgtggacgcaccggtgatgccggaattgccctcggaggcggactggtccatttttgtgaacgaggtggaggccgtggcagaggggatgccgacggaagtctcggaggtcccggcgtggaaggccaagtgcaagaatgtggctgcactgggtagggagatgtgcatcacggcagtacagatgtcggagctgcagtatgacatctgggtgcaaggcatgatgcgggatatggctcgaagccaggcagacaggctggccgcaattcaacccgcggaccttaccaactatttggagatggctacccagatggatatgcggactacgaggatactgatagggctcctcaacatattgcgcatccagaatgcggcacttatgtatgagtaccttctaacgcccacgcagctcactgcatggccgctgagaatggatactgtggccaacttgctcatcacgcacgagagtgctgcactgtcaggattagctcagttagggcccccatcggacttcacgagcaggcatgtggtgaaagacatacctgtgaacttgctgctcgatggcgaggattgggagtttgagattcctgtgcaagctggcatgtccagcttcccttccagctggactcgagtgcggattcggcacctggagatgcactttgtgaaggaggccagcggtattggtggtgagattatccaccagcctgccacccagactgggaccgtttacatccttctgcagggttccactatcttccatgatcgcagaagggaggaggtgatgacctttcaggcagcggttccgctcaactaccattacgcgtaccgcctcgacactggagaagccactcttacgaacgagccctcggaacagtttgccaacacattcatgcagatgacaccgttcactcactggaggctacgtctgtctgcgtccgcagcggagaataaaggattagcctttcccacggctacagcacttgactccactacccagattgtcatcactttccatgttacggccattagacaaattgactggcggcacgacgaagag

SEQ ID NO: 503 - DNA, 2598 bp, synthetic construct
  misc_feature 1..2598: note = Synthetic
  source 1..2598: mol_type = other DNA
atggctctcgtggattacggcaagcttttcgaggatctgaaccagataagcatgggtgtactggatcgggtagagttttcagaggtgatggtgatccacaggatgtatgtgaggctagctgatctgaatgtggggcagctcgagggagccgagaaagtgaagcggttgtatgtgtttgcggacgtggtggagctaccagtcgtggaatggcggtggccgccgcaaataccaggatcggtgacggtgatcatattgtgtcgtcttcttcaatggccaactgatgggaggcagtcggacaccgagctccacctgacattcatgaagttgcatgccatacaacgagaggaaaatcggtgggagataaccgcagcagatggcatgaactggggagtttacatacacgcagaggaagtacaggttggcgtgctgacaatgtcatggtcttcggtacttagagtttcggcacttcgctctgttataacctccggctttcgcgccgttagtgtgtttgaggtaccgggaagtgtaaggtccacccttggagctactttaaggcccgatcacgccttatatagtacaactatgcaagccacacccaacgcatcgcatattagtgcttttaaccttcgcatagtttccccgtcggcatatcgtgtttgtcctctccaaaatgacacagatacctacttaggtattccagcagacgtggcggcagttcttccagtagacgtggtgactgatcctaacatcttgctgggcatgcagacaacggtacacattgcggagctagtcaaggcatgtcatccgtcacccgatgttgtgagcgctgtaggggagcacctgaactggctcaacaaactcttactcccacttaaggaatcgactcagttgcaaggaagcgagtcgtacaaggagtgccttgcactcttgggtcgtgttcacgctgcgatgaagatggtgagaattggcttagtagtgccccagctgcaatacagaatgtacggtagcctcatcaaccaaatggcccaagtagcacaaaactacgaccgagaattcaagcaattcaaattattcatcatccaaaatcaaatccttggcagctatttgctgcagcagaacagggcatttgctgagagggagctgcagatggagagctttcatgctgctgtcatttctcaaagaagggaggagttggacaatacattcgcaaagatggaccgattgagcgggcagatggaggaagaggacagagcaatggagcaagcccgaaaagaaatggaagaaggattgaagcagttccagaatgagcaagttgcaagggctgtgttcgctgttcttaaatctgtagctcagattgggcttgcattccttacggctggtgcaacggctcctggagctgtggcgtcggcggggcaagctgtgagcatagcaggtcaggcggcgcaaggtctgcgaagggtggtggaaattctagagcagctggaggctgtgatggaggttgtggctgctgtgaaggacctcgtggattcattggaacaggtaggtcagattgtggacgcaccggtgatgccggaattgccctcagaggcggactggtccatttttgtgaacgaggtggaggccgtggcagagggcatgccaacggaagtctcggaggttccggtgtggaaggccaagtgcaagaatgtggctgcactgggtcgggagatgagcatcacggcagtacagatgtcggagctgcagtatgacatctgggtgcaaggcatgatgcgggatatggctcgaagccaggcagacaggctggccgcaattcaacccgcggaccttaccaactatttggagatggcaatacagatggatatgcggactacgaggatgctgctggggctcctcaacatattgcgcatccagaatgcggcgctcaggtacgagtatcttctaatgcccacggagctcacaacatggccactgggtatggataccgtggccaacttgctcatcacgcacgagagtgctgcactgtcaggattagctcagttagggccctcatctgatttctcgagcaggcatgtagtgaaaggcatacctgtgagcttgcttctagacggtggggattgggagtttgagattcctgtgcaagctggcatgtccagcttcccttccagctggtctcgcgtccgtattcggcacctggagatgcactttgtgaaggaggcgagcggtggcggcgagattatccaccagcctaccacccagacggggaccatttacatcctcctgcagggctccactgtcttccatgatcgcagaagggaggaggtgatgacctttcaggcagcggttccgctcaactaccattacgcgtaccgcctcgacactggagaagccactcttacgaacgagccctcggaacagtttgccaacaagttcatgcagatgacacccttcacccgttggaggcttcgtctgtctgcgtccgcaaaagagaatgcaggattagcctttcccacggctacagcacttgactccactacccagattgtcatcactttccatgttacggccattagacaaattgactggcggcaagaggaggag

SEQ ID NO: 504 - DNA, 2602 bp, synthetic construct
  misc_feature 1..2602: note = Synthetic
  source 1..2602: mol_type = other DNA
atggctctcgtggattacggcaagcttttcgaggatctgaaccagataagcatgggtgtactggatcgggtagagttttcagaggtgatggtgatccacaggatgtatgtgaggctagctgatctgaatgtggggcagctcgagggagccgagaaagtgaagcggttgtatgtgtttgcggacgtggtggagctaccagtcgtggaatggcggtggccgccgcaaataccaggatcggtgacggtgatcatattgtgtcgtcttcttcaatggccaactgatgggaggcagtcggacaccgagctccacctgacattcatgaagttgcatgccatacaacgagaggaaaatcggtgggagataaccgcagcagatggcatgaactggggagtttacatacacgcagaggaagtacaggttggcgtgctgacaatgtcatggtcttcggtacttagagtttcggcacttcgctctgttataacctccggctttcgcgccgttagtgtgtttgaggtaccgggaagtgtaaggtccacccttggagctactttaaggcccgatcacgccttatatagtacaactatgcaagccacacccaacgcatcgcatattagtgcttttaaccttcgcatagtttccccgtcggcatatcgtgtttgtcctctccaaaatgacacagatacctacttaggtattccagcagacgtggcggcagttcttccagtagacgtggtgactgatcctaacatcttgctgggcatgcagacaacggtacacattgcggagctagtcaaggcatgtcatccgtcacccgatgttgtgagcgctgtaggggagcacctgaactggctcaacaaactcttactcccacttaaggaatcgactcagttgcaaggaagcgagtcgtacaaggagtgccttgcactcttgggtcgtgttcacgctgcgatgaagatggtgagaattggcttagtagtgccccagctgcaatacagaatgtacggtagcctcatcaaccaaatggcccaagtagcacaaaactacgaccgagaattcaagcaattcaaattattcatcatccaaaatcaaatccttggcagctatttgctgcagcagaacaaggcctttgctgacagagaggtgcagatggagagctttcatgctgctgtcatttctcaaagaagggaggagttggacaatacattcgcaaagatggaccgattgagcgggcaaatggaggcagagagtagtgcaatggagcaagccaaaaaggaaatggacgaaggattgaggcagttccagaatgagcaagttgcaagggctgtgttcgctgttcttaaatctgtagctatgattgcgctcgcattcgtcacggctggtgcaacggctcctggagctgtggcgtcggcggggcaagctgtgagcatagcaggtcaggcggcacaaggtctgcgaagggtggtggaaattctagaggggctcgaggctgtgatggaggttgtggctgctgtgaaggacctcgtggattcattggaacaggtaggtcagattgtggatgcaccggtgatgccggaattgccctcagaggcggactggtccatttttgtgaacgaggtggaggccgtggcagagggcatgccgacggaagtctcggaggttccggcgtggagggccaagtgcaagaatgtggctgcactgggtagggagatgtgcatcacggcagtacagatttcccagctccagtatgacatctgggtgcaaggcatgatgcgggatatggctcgaagccaggcagacaggctggccgcaattcaacccgcggaccttaccaactatttggagatggctacccagatggatatgcggactacgaggatgctgctggggctcctcaacatattgcgcatccagaatgcggcgctcaggtacgagtatcttctaatgcccacggagctcacaacatggccactgggtatggataccgtgggtgacttgctcatcgcgcaggagaatgctgcactgataggattaatgcagctagggcccccatcggacttcacgagcaggcatgtggtgaaagacatacctgtgaacttgctgctcgatggcgaggattgggagtttgagattcctgtgcaagctggcatgtccagcttcccttccagctggtctcgcgtccgtattcggcacctggagatgcactttgtgcaggaggcgagcggtggcggcgagattatccaccagcctaccacccagactgggaccgtttacatccttctgcagggttccactatcttccatgaccgcagaagagaccaggtgttgccttttcaggccgctgctccgctcaactaccattacgcgtaccgcctcgacactggagaagccactcttacgaacgagccctcggaacagtttgccaacacattcatgcagatgacaccgttcactcactggaggctacgtctgtctgcgtccgcagcggagaataaaggattagcctttcccacagctacagctcccgactccaccactgagattgccatcactttccatgttacggccatcagacaaattgactggcggcacgacgaagagtagc

SEQ ID NO: 505 - DNA, 2050 bp, synthetic construct
  misc_feature 1..2050: note = Synthetic
  source 1..2050: mol_type = other DNA
atggattacagcacgctttacagggatctgaaccagataagcatgcccctggatcgggtagagttctcagaggtgatggtgatccacaggatgtatgtgaggctagctgatctgaatgtgggggagctccccggagccgagagggtgaagcggttgtatgtgttggcagacgtggtgactgatcctaacatcttgatgggcatgcaaaccagcgtgcacattgcggagctagtgaaggcatgttacccgtcaccagaattagtgagcgctgtaggggtgcacgtgaattggctcaacgaagtcttgctccgagttgtccagaaggaatctcagttgcaagggaccgaggcctacaacgagtgccttgcgcttttaggtcgcattcaatgtgtcatgaagatggggccgtttgtctcggtagtgccgcagctgcaatacagaatgtatggtagcctcatcagacaaatggcccaggtagcacagaactacgaccaagatttcaggcagctcaagttattcattgcccaaaaccaaatccttggcagctatttgctgcagcagaacaaggcctttgctgacagagaggtgcagatggagagctttcattcagcggtcatttctcaaagaaggcaggagttggacgacgccatcgctaagatggaccgactgagcttgcagatggaggaagaggacagagcaatggagcaagcccgaaaagaaatggaagaaggattgaagcagttccagaatgagcaagttgcaagggctgtgttcgctgttcttaaatctgtagctatgattgcgctcgcattcgtcacggctggtgcaacggctcctggggctgcagcatctgcagcgcaagctgtgagcatagcaggtcaggcggcgcaaggtctgcgaagggtggtggaaattctagagcagctggaggctgtgatggaggttgtggctgctgtgaaggacctcgtggattcattggaacaggtaggtcagattgtggacgcaccggtgatgccggaattgccctcagaggcggactggagtatttttgtgaacgaggtggaggccgtggcagagggcatgccaacggaagtctcggaggttccggtgtggagggccaagtgcaagaatgtggctgcactgggtagggagatgtgcatcacggcagtacagatgtcggagctgcagtatgacatctgggtgcaaggcatgatgcgggatatagctcaaagccacgcagaccggctggcagcgattcaacctgctaatcttaccaactatttggagatggctacccagatggatatgcggactacgaggatgctgctggggctcctcaacatattgcgcatccagaatgcggcgctcaggtacgagtatcttctaatgcccacggagctcacaacatggccactgggtatggataccgtgggtgacttgctcatcgcgcaggagaatgctgcactgataggattaatgcagctagggccctcatctgatttcacgagcaggcatgtagtgaaaggcatacctgtgagcttgcttctagacggtggggattgggaatttgagattcctgtgcaaggtggcatgtccagtttcccttccagctggtctcgcgtccgtattcggcacctggagatgcactttgtgaaggaggccagcggtattggtggtgagattatccaccagcctaccacccagactgggaccgtttacatccttctgcagggctccactgtcttccatgatcgcagaagggaggaggtgatgacctttcaggcagcggttccgctcaactaccattacgcgtaccgcctcgacaccggcgactccactctcacgaacgagccctcggaacagtttgccaacacattcatgcagatgacacccttcacccgttggaggcttcgtctgtctgcgtccgcagcggagaataaaggattagcctttcccacagctacagctcccgactccaccactgagattgccatcactttccatgttacggccattagacaaattgactggcggcacgacgaagagtagc

SEQ ID NO: 506 - DNA, 2569 bp, synthetic construct
  misc_feature 1..2569: note = Synthetic
  source 1..2569: mol_type = other DNA
atggctctcgtggattacggcaagcttttcgaggatctgaaccagataagcatgggtgtactggatcgggtagagttttcagaggtgatggtgatccacaggatgtatgtgaggctagctgatctgaatgtggggcagctcgagggagccgagaaagtgaagcggttgtatgtgtttgcggacgtggtggagctaccagtcgtggaatggcggtggccgccgcaaataccaggatcggtgacggtgatcattctgtgtcgtcttcttcagtttccaactgatgggtcgttcgctgcttggctcgagctgccgttcatggagttgcacacactcatagaacaatacaggtcagagataaaagcagcagatgacgcgaaatggggaacgtatgtacacgcggaggaagtacagctcagcccgctgtttaatgggtggccttatctggttgttgaggcacagcgctgtattataaccgcggccatgcacaatacatttaaccgccctgggtgggttcgctccattactcaatttacaactgatcagtccggtcgggtagataccacactgctcgcacgaacagaattcggccatattgatctaccactcgaaacagattccccaacggcattcagtgtttcacaccgccaaagtacgaatttgcccgtagagtacaccggtattccagtggaggtggtgaccgatcctaacatcttgatgggcatgcagacaacggtacacattgcggagctagtcaaggcatgtcatccgtcacccgatgttgtgagcgctgtaggggagcacctgaactggctcaacgaagtcttgctccgagttgtccagaaggaatctcagttgcaagggaccgaggcctacaacgagtgccttgcgcttttaggtcgcattcaatgtgtcatgaagatggggccgtttgtctcggtagtgccgcagctgcaatacagaatgtatggtagcctcatcaaccaaatggcccaggtagcacagaactacgaccaagatttcaggcagctcaagttattcattgcccaaaaccaaatccttggcagctatttgctgcagcagaacagggcatttgctgacagagaggtgcagatggagagctttcattcagcggtcatttctcaaagaaggcaggagttggacgacgccatcgctaagatggaccgactgagcttgcagatggaggaagaggacagagcaatggagcaagccaaaaaggaaatggacgaaggattgaggcagttccagaataggcaagttgcgaacgccctctttgccgttcttagcgctgtagctcagattgggcttgcattccttacggctggtgcaacggctcctggagctgtggcgtcggcggggcaagctgtgagcatagcaggtcaggcggcgcaaggtctgcgaagggtggtggaaattctagaggggctcgaggctgtgatggaggttgtggctgctgtgaaggacctcgtggattcattggaacaggtaggtcagattgtggacgcaccggtgatgccggaattgccctcagaggcggactggtccatttttgtgaacgaggtggaggccgtggcagagggcatgccaacggaagtctcggaggttccggtgtggaaggccaagtgcaagaatgtggctgcactgggtcgggagatgagcatcacggcagaacagatgtcggagctgcagtatgacatctgggtgcaaggcttgatgcgggatatggctcgaagccaggcagacaggctggccgcaattcaacccgcggaccttaccaactatttggagatggctacccagatggatatgcggactacgaggatgctgctggggctcctcaacataatgcgcatccagaatgcggcgctcaggtacgagtatcttctaatgcccacggagctcacaacatggccactgggtatggataccgtgggtgacttgctcatcgcgcaggagaatgctgcactgataggattaatgcagctagggcccccatcggacttcacgagcaggcatgtagtgaaaggcatacctgtgagcttgcttctagacggtggggattgggaatttgagattcctgtgcaagctggcatgtccagtttcccttccagctggactcgagtgcggattcggcacctggagatgcactttgtgaaggaggccagcggtattggtggtgagattatccaccagcctaccacccagactgggaccgtttacatccttctgcagggttccactatcttccatgaccgcagaagagaccaggtgttgccttttcaggccgctgctccgctcaactaccattacgcgtaccgcctcgacactggagaagccactcttacgaacgagccctcggaacagtttgccaacacattcatgcagatgacacccttcacccgttggaggcttcgtctgtctgcgtccgcaaaagagaatgcaggattagcctttcccacggctacagcacttgactccactacccagattgtcatcactttccatgttacggccatcagacaaattgactggcggcacgacgaagagtagc

SEQ ID NO: 507 - DNA, 2563 bp, synthetic construct
  misc_feature 1..2563: note = Synthetic
  source 1..2563: mol_type = other DNA
atggattacagcacgctttacagggatctgaaccagataagcatgcccctggatcgggtagagttctcagaggtgatggtgatccacaggatgtatgtgaggctagctgatctgaatgtggggcagctcgagggagccgagaaagtgaagcggttgtatgtgttggcagacgtggtggagctcgcaacatttgcgcatccacagttgcttaatacgcggatgccaggatcggtgacggtgatcattctgtgtcgtcttcttcagtttccaactgatgggtcgttcgctgcttggctcgagctgccgttcatggagttgcacacactcataggacaatacaggtcagagataaaagcagcagatgacgcgaaatggggaacgtatgtacacgcggaggaagtacagctcagcccgctgtttaatgggtggccttatctggttgttgaggcacagcgctgtattataaccgcggccatgcacaatacatttaaccgccctgggtgggttcgctccattactcaatttacaactgatcagtccggtcgggtagataccacactgctcgcacgaacagaattcggccatattgatctaccactcgaaacagattccccaacggcattcagtgtttcacaccgccaaagtacgaatttgcccgtagagtacaccggtattccagtggaggtggtgaccgatcctaacatcttgatgggcatgcaaaccagcgtgcacattgcggagctagtgaaggcatgttacccgtcacccgatgttgtgagcgctgtaggggtgcacgtgaattggctcaacgaagtcttgctccgagttgtccagaaggaatctcagttgcaagggaccgaggcctacaacgagtgccttgcgcttttaggtcgcattcaatgtgtcatgaagatggggccgtttgtctcggtagtgccgcagctgcaatacagaatgtatggtagcctcatcagacaaatggcccaggtagcacagaactacgaccaagatttcaggcagctcaagttattcattgcccaaaaccaaatccttggcagctatttgctgcagcagaacaaggcctttgctgacagagaggtgcagatggagagctttcatgctgctgtcatttctcaaagaaggcaggagttggacgacgccatcgctaagatggaccgactgagcttgcagatggaggaagaggacagagcaatggagcaagccaaaaaggaaatggacgaaggattgaggcagttccagaataggcaagttgcgaacgccctctttgccgttcttagcgctgtagctcagattgggctcgcattccttacggctggtgcaacggctcctggagctgtggcgtcggcggggcaagctgtgagcatagcaggtcaggcggcgcaaggtctgcgaagggtggtggaaattctagaggggctcgaggctgtgatggaggttgtggctgctgtgaaggacctcgtggattcattggaacaggtaggtcagattgtggacgcaccggtgatgccggaattgccctcagaggcggactggtccatttttgtgaacgaggtggaggccgtggcagagggcatgccaacggaagtctcggaggttccggtgtggagggccaagtgcaagaatgtggctgcactgggtagggagatgtgcatcacggcagaacagatttcccagctccagtatgacatctgggtgcaaggcttgttgcgggatatagctcaaagccacgcagaccggctggcagcgattcaacctgctaatcttaccaactatttggagatggcaatacagatggatatgcggactacgaggatactgatagggctcctcaacataatgcgcatccagaatgcggcacttatgtatgagtaccttctaacgcccacgcagctcactgcatggccgctgagaatggatactgtggccaacttgctcatcacgcacgagagtgctgcactgtcaggattagctcagttagggcccccatcggacttcacgagcaggcatgtagtgaaaggcatacctgtgagcttgcttctagacggtggggattgggaatttgagattcctgtgcaaggtggcatgtccagtttcccttccagctggactcgagtgcggattcggcacctggagatgcactttgtgcaggaggccagcggtattggtggtgagattatccaccagcctaccacccagacggggaccatttacatcctcctgcagggctccactgtcttccatgatcgcagaagggaggaggtgatgacctttcaggcagcggttccgctcaactaccattacgcgtaccgcctcgacaccggcgactccactctcacaaacgagccctcggaacagtttgccaacacattcatgcaggtgacacccttcacccgttggaggcttcgtctgtctgcgtccgcaaaagagaatgcaggattagcctttcccacggctacagcacttgactccactacccagattgtcatcacttttcatgttacggccatcagacaaattgactggcggcacgacgaagagtagc

SEQ ID NO: 508 - DNA, 2569 bp, synthetic construct
  misc_feature 1..2569: note = Synthetic
  source 1..2569: mol_type = other DNA
atggctctcgtggattacggcaagcttttcgaggatctgaaccagataagcatgcccctggatcgggtagagttctcagaggtgatggtgatccacaggatgtatgtgaggctagctgatctgaatgtggggcagctcgagggagccgagagggtgaagcggttgtatgtgttggcagacgtggtggagctcgcaacatttgcgcatccacagttgcttaatacgcggatgccaggatcggtgacggtgatcattctgtgtcgtcttcttcagtttccaactgatgggtcgttcgctgcttggctcgagctgccgttcatggagttgcacacactcatagaacaatacaggtcagagataaaagcagcagatgacgcgaaatggggaacgtatgtacacgcggaggaagtacagctcagcccgctgtttaatgggtggccttatctggttgttgaggcacagcgctgtattataaccgcggccatgcacaatacatttaaccgccctgggtgggttcgctccattactcaatttacaactgatcagtccggtcgggtagataccacactgctcgcacgaacagaattcggccatattgatctaccactcgaaacagattccccaacggcattcagtgtttcacaccgccaaagtacgaatttgcccgtagagtacaccggtattccagtggaggtggtgaccgatcctaacatcttgatgggcatgcaaaccagcgtgcacattgcggagctagtcaaggcatgttacccgtcaccagaattagtgagcgctgtaggggtgcacgtgaattggctcaacgaagtcttgctccgagttgtccagaaggaatctcagttgcaagggaccgaggcctacaacgagtgccttgcgcttttaggtcgcattcaatgtgtcatgaagatggggccgtttgtctcggtagtgccgcagctgcaatacagaatgtacggtagcctcatcaaccaaatggcccaggtagcacagaactacgaccaagatttcaggcagctcaagttattcattgcccaaaaccaaatccttggcagctatttgctgcagcagaacagggcatttgctgagagggagctgcagatggagagctttcatgctgctgtcatttctcaaagaagggaggagttggacaatacattcgcaaagatggaccgactgagcttgcagatggaggaagaggacagagcaatggagcaagccaaaagggaaatggacgaaggattgaggcagttccagaatgagcaagttgcaagggctgtgttcgctgttcttaaatctgtagctatgattgcgctcgcattcgtcacggctggtgcaacggctcctggagctgtggcgtcggcggggcaagctgtgagcatagcaggtcaggcggcgcaaggtctgcgaagggtggtggaaattctagaggggctcgaggctgtgatggaggttgtggctgctataaagcaccttgtggatgctctggaccaggtaagtcagattgtggacgcaccggtgatgccggaattgccctcagaggcggactggtccatttttgtgaacgaggtggaggccgtggcagagggcatgccaacggaagtctcggaggttccggtgtggagggccaagtgcaagaatgtggctgcactgggtagggagatgtgcatcacggcagaacagatttcccagctccagtatgacatctgggtgcaaggcttgttgcgggatatagctcaaagccacgcagaccggctggccgcaattcaacccgcggaccttaccaactatttggagatggctacccagatggatatgcggactacgaggatgctgctggggctcctcaacatattgcgcatccagaatgcggcgctcaggtacgagtatcttctaatgcccacggagctcacaacatggccactgggtatggataccgtgggtgacttgctcatcacgcacgagagtgctgcactgtcaggattagctcagttagggcccccatcggacttcacgagcaggcatgtggtgaaagacatacctgtgaacttgctgctcgatggcgaggattgggagtttgagattcctgtgcaagctggcatgtccagtttcccttccagctggactcgagtgcggattcggcacctggagatgcactttgtgcaggaggcgagcggtggcggcgagattatccaccagcctaccacccagactgggaccgtttacatccttctgcagggttccactgtcttccatgatcgcagaagggaggaggtgatgacctttcaggcagcggttccgctcaactaccattacgcgtaccgcctcgacaccggcgactccactctcacgaacgagccctcggaacagtttgccaacaagttcatgcagatgacaccgttcactcactggaggctacgtctgtctgcgtccgcagcggagaataaaggattagcctttcccacagctacagctcccgactccaccactgagattgccatcactttccatgttacggccattagacaaattgactggcggcacgacgaagagtagc

SEQ ID NO: 509 - DNA, 2565 bp, synthetic construct
  misc_feature 1..2565: note = Synthetic
  source 1..2565: mol_type = other DNA
atggctctcgtggattacggcaagcttttcgaggatctgaaccagataagcatgcccctggatcgggtagagttctcagaggagatggtgatccacaggatgtatgtgaggctagctgatctgaatgtggggcagctcgagggagccgagaaagtgaagcggttgtatgtgttggcagacgtggtggagctcgccacatttgcgcatccacagttgcttaatacgcggatgccaggatcggtgacggtgatcattctgtgtcgtcttcttcagtttccaactgatgggtcgttcgctgcttggctcgagctgccgttcatggagttgcacacactcatagaacaatacaggtcagagataaaagcagcagatgacgcgaaatggggaacgtatgtacacgcggaggaagtacagctcagcccgctgtttaatgggtggccttatctggttgttgaggcacagcgctgtattataaccgcggccatgcacaatacatttaaccgccctgggtgggttcgctccattactcaatttacaactgatcagtccggtcgggtagataccacactgctcgcacgaacagaattcggccatattgatctaccactcgaaacagattccccaacggcattcagtgtttcacaccgccaaagtacgaatttgcccgtagagtacaccggtattccagtggaggtggtgaccgatcctaacatcttgatgggcatgcaaaccagcgtgcacattgcggagctagtgaaggcatgttacccgtcaccagaattagtgagcgctgtaggggtgcacgtgaattggctcaacgaagtcttgctccgagttgtccagaaggaatctcagttgcaagggaccgaggcctacaacgagtgccttgcgcttttaggtcgcattcaatgtgtcatgaagatggggccgtttgtctcggtagtgccccagctgcaatacagaatgtacggtagcctcatcagacaaatggcccaggtagcacagaactacgaccgagaattcaagcaattcaaattattcatcatccaaaatcaaatccttggcagctatttgctgcagcagaacagggcatttgctgagagggagctgcagatggagagctttcattcagcggtcatttctcaaagaaggcaggagttggacgacgccatcgctaagatggaccgactgagcttgcagatggaggcagagagtagtgcaatggagcaagccaaaaaggaaatggacgaaggattgaggcagttccagaataggcaagttgcgaacgccctctttgccgttcttagcgctgtagctcagattgggcttgcattccttacggctggtgcaacggctcctggagctgtggcgtcggcggggcaagctgtgagcatagcaggtcaggcggcgcaaggtctgcgaagggtggtggaaattctagagcagctggaggctgtgatggaggttgtggctgctgtgaaggacctcgtggattcattggaacaggtaggtcagattgtggacgcaccggtgatgccggaattgccctcggaggcggactggagtatttttgtgaatgagattgaagccgtggcagaggggatgccgacggaagtctcggaggttccggcgtggaaggccaagtgcaagaatgtggctgcactgggtagggagatgtgcatcacggcagaacagatttcccagctccagtatgacatctgggtgcaaggcttgttgcgggatatagctcaaagccacgcagaccggctggcagcgattcaaccagctaatcttaccaactatttggagatggctatacagatggatatgcggactacgaggatgctgccggggctcctcaacatattgcgcatccagaatgcggcgctcaggtacgagtatcttctaatgcccacggagctcacaacatggccactgggtatggataccgtgggtgacttgctcatcgcgcaggagaatgctgcactgataggattaatgcagctagggccctcatctgatttcacgagcaggcatgtggtgaaaggcatacctgtgagcttgcttctagacggtggggattgggaatttgagattcctgtgcaagctggcatgtccagcttcccttccagctggtctcgcgtccgtattcggcacctggagatgcactttgtgcaggaggcgagcggtggcggcgagattatccaccagcctgccacccagacggggaccatttacatcctcctgcagggctccactgtcttccatgatcgcagaagagaccaggtgttgccttttcaggccgctgctccgcccaactaccattacgcgtaccgcctcgacaccggcgactccactctcacaaacgaaccctctgaacagtttgccaacacattcatgcagatgacaccgttcactcactggaggctacgtctgtctgcgtccgcagcggagaataaaggattagcctttcccacagctacagctcttgactccaccactgagattgccatcactttccatgttacggccatcagacaaattgactggcggcacgacgaggag

SEQ ID NO: 510 - DNA, 2568 bp, synthetic construct
  misc_feature 1..2568: note = Synthetic
  source 1..2568: mol_type = other DNA
atggctctcgtggattacggcaagcttttcgaggatctgaaccagataagcatgggtgtactggatcgggtagagtcctcagaggtgatggtaatccacaggatgtatgtgaggctagctgatctgaatgtgggggagctccccggagccgagagggtgaagcggttgtatgtgttggcagacgtggtggagctcgcaacatttgcgcatccacagttgcttaatacgcggatgccaggatcggtgacggtgatcattctgtgtcgtcttcttcagtttccaactgatgggtcgttcgctgcttggctcgagctgccgttcatggagttgcacacactcatagaacaatacaggtcagagataaaagcagcagatgacgcgaaatggggaacgtatgtacacgcggaggaagtacagctcagcccgctgtttaatgggtggccttatctggttgttgaggcacagcgctgtattataaccgcggccatgcacaatacatttaaccgccctgggtgggttcgctccattactcaatttacaactgatcagtccggtcgggtagataccacactgctcgcacgaacagaattcggccatattgatctaccactcgaaacagattccccaacggcattcagtgtttcacaccgccaaagtacgaatttgcccgtagagtacaccggtattccagtggaggtggtgaccgatcctaacatcttgatgggcatgcaaaccagcgtgcacattgcggagctagtgaaggcatgttacccgtcaccagaattagtgagcgctgtaggggtgcacgtgaattggctcaacgaagtcttgctccgagttgtccagaaggaatctcagttgcaagggaccgaggcctacaacgagtgccttgcgcttttaggtcgctttcaatgtgtcatgaagatggggccgtttgtctcggtagtgccgcagctgcaatacagaatgtacggtagcctcatcaaccaaatggcccaagtagcacaaaactacgaccaagatttcaggcagctcaagttattcattgcccaaaaccaaatccttggcagctatttgctgcagcagaacagggcatttgctgagagggagctgcagatggagagctttcatgctgctgtcatttctcaaagaaggcaggagttggacgacgccatcgctaagatggaccgactgagcttgcagatggaggcagagagtagtgcaatggagcaagccaaaaaggaaatggacgaaggattgaggcagttccagaataggcaagttgcgaacgccctctttgccgttcttagcgctgtagctcagattgcgctcgcattcgtcacggctggtgcaacggctcctggagctgtggcgtcggcggggcaagctgtgagcatagcaggtcaggcggcgcaaggtctgcgaagggtggtggaaattctggaggggctcgaggctgtgatggaggttgtggctgctataaagcaccttgtggatgctctggaccaggtaagtcagattgtggatgcaccacctatgccagacatgccctcggaggcggactggtccatttttgtgaatgagattgaagccgtggcagagggcatgccaacggaagtctcggaggttccggtgtggagggccaagtgcaagaacgtggctgcactgggcagggagatgtgcatcacggcagtacagatgtcggagctgcagtatgacatctgggtgcaaggcatgatgcgggatatggctcgaagccaggcagacaggctggccgcaattcaacccgcggaccttaccaactatttggagatggcaatacagatggatatgcggactacgaggatgctgctggggctcctcaacatattgcgcatccagaatgcggcgctcaggtacgagtatcttctaatgcccacggagctcacaacatggccactgggtatggataccgtgggtgacttgctcatcgcgcaggagaatgctgcactgataggattaatgcagctagggccctcatctgatttcacgagcaggcatgtggtgaaagacatacctgtgaacttgctgctcgatggcgaggattgggaatttgagattcctgtgcaaggtggcatgtccagtttcccttccagctggactcgagtgcggattcggcacctggagatgcactttgtgcaggaggcgagcggtggcggcgagattatccaccagcctgccacccagacggggaccatttacatccttctgcagggttccactgtcttccatgatcgcagaagggaggaggtgatgacctttcaggcagcggttccgctcaactaccattacgcgtaccgcctcgacactggagaagccactcttacggacgagccctcggaacagtttgccaacaagttcatgcagatgacacccttcacccgttggaggcttcgtctgtctgcgtccgcagcggagaataaaggattagcctttcccacagctacagctcccgactccaccactgagattgccatcactttccatgttacggccattagacaaattgactggcggcaagaggaggag

SEQ ID NO: 511 - DNA, 2559 bp, synthetic construct
  misc_feature 1..2559: note = Synthetic
  source 1..2559: mol_type = other DNA
atggattacagcacgctttacagggatctgaaccagataagcatgcccctggatcgggtagagttctcagaggtgatggagatccacaggatgtatgtgaggctagctgatctgaatgtggggcagctcgagggagccgagagggtgaagcggttgtatgtgtttgcggacgtggtggagctcgcaacatttgcgcatccacagttgcttaatacgcggatgccaggatcggcgacggtgatcattctgtgtcgtcttcttcagtttccaactgatgggtcgttcgctgcttggctcgagctgccgttcatggagttgcacacactcatagaacaatacaggtcagagataaaagcagcagatgacgcgaaatggggaacgtatgtacacgcggaggaagtacagctcagcccgctgtttaatgggtggccttatctggttgttgaggcacagcgctgtattataaccgcggccatgcacaatacatttaaccgccctgggtgggttcgctccattactcaatttacaactgatcagtccggtcgggtagataccacactgctcgcacgaacagaattcggccatattgatctaccactcgaaacagattccccaacggcattcagtgtttcacaccgccaaagtacgaatttgcccgtagagtacaccggtattccagtggaggtggtgaccgatcctaacatcttgctgggcatgcagacaacggtacacattgcggagctagtcaaggcatgtcatccgtcacccgatgttgtgagcgctgtaggggtgcacgtgaattggctcaacgaagtcttgctccgagttgtccagaaggaatctcagttgcaagggaccgaggcctacaacgagtgccttgcgcttttaggtcgcattcaatgtgtcatgaagatggggccgtttgtctcggtagtgccgcagctgcaatacagaatgtatggtagcctcatcagacaaatggcccaggtagcacagaactacgaccaagatttcaggcagctcaagttattcattgcccaaaaccaaatccttggcagctatttgctgcagcagaacaaggcctttgctgacagagaggtgcagatggagagctttcatgctgctgtcatttctcaaagaagggaggagttggacaatacattcgcaaagatggaccgattgagcgggcagatggaggaagaggacagagcaatggagcaagcccgaaaagaaatggaagaaggattgaggcagttccagaataggcaagttgcgaacgccctctttgccgttcttagcgctgtagctcagattgggcttgcattccttacggctggtgcaacggctcctggggctgtggcgtcggcggggcaagctgtgagcatagcaggtcaggcggcgcaaggtctgcgaagggtggtggaaattctagaggggctcgaggctgtgatggaggttgtggctgctataaagcaccttgtggatgctctggaccaggtaagtcagattgtggatgcaccacctatgccagacatgccctcggaggcggactggagtatttttgtgaatgagattgaagccgtggcagaggggatgccgacggaagtctcggaggttccggtgtggagggccaagtgcaagaatgtggctgcactgggtcgggagatgagcatcacggcagtacagatgtcggagctccagtatgacatctgggtgcaaggcttgttgcgggatatagctcaaagccacgcagaccggctggcagcgattcaaccagctaatcttaccaactatttggagatggctacccagatggatatgcggactacgaggatgctgctggggctcctcaacataatgcgcatccagaatgcggcgctcatgtacgagtaccttctaacgcccacgcagctcactgcatggccgctgagaatggatactgtggccaacttgctcatcacgcacgagagtgctgcactgtcaggattagctcagttagggcccccatcggacttcacgagcaggcatgtagtgaaaggcatacctgtgagcttgcttctagacggtggggattgggaatttgagattcctgtgcaagctggcatgtccagcttcccttccagctggtctcgcgtccgtattcggcacctggagatgcactttgtgaaggaggccagcggtattggtggtgagattatccaccagcctgccacccagacggggaccatttacatcctcctgcagggctccactgtcttccatgatcgcagaagagaccaggtgttgccttttcaggccgctgctccgctcaactaccattacgcgtaccgcctcgacactggagaagccactcttacgaacgagccctcggaacagtttgccaacaagttcatgcagatgacaccgttcacccgttggaggcttcgtctgtctgcgtccgcagcggagaatgaaggattagcctttcccacagctacagctcccgactccaccactgagattgccatcactttccatgttacggccatcagacaaattgactggcggcaagaggaggag

SEQ ID NO: 512 - DNA, 2565 bp, synthetic construct
  misc_feature 1..2565: note = Synthetic
  source 1..2565: mol_type = other DNA
atggctctcgtggattacggcaagcttttcgaggatctgaaccagataagcatgcccctggatcgggtagagttttcagaggtgatggtgatccacaggatgtatgtgaggctagctgatctgaatgtgggggagctccccggagccgagagggtgaagcggttgtatgtgttggcagacgtggtggagctcgcaacatttgcgcatccacagttgcttaatacgcggatgccaggatcggtgacggtgatcattctgtgtcgtcttcttcagtttccaactgatgggtcgttcgctgcttggctcgagctgccgttcatggagttgcacacactcatagaacaatacaggtcagagataaaagcagcagatgacgcgaaatggggaacgtatgtacacgcggaggaagtacagctcagcccgctgtttaatgggtggccttatctggttgttgaggcacagcgctgtattataaccgcggccatgcacaatacatttaaccgccctgggtgggttcgctccattactcaatttacaactgatcagtccggtcgggtagataccacactgctcgcacgaacagaattcggccatattgatctaccactcgaaacagattccccaacggcattcagtgtttcacaccgccaaagtacgaatttgcccgtagagtacaccggtattccagtggaggtggtgaccgatcctaacatcttgatgggcatgcaaaccagcgtgcacattgcggagctagtgaaggcatgttacccgtcacccgatgttgtgagcgctgtaggggtgcacgtgaattggctcaacgaagtcttgctccgagttgtccagaaggaatctcagttgcaagggaccgaggcctacaacgagtgccttgcgcttttaggtcgcattcaatgtgtcatgaagatggggccgtttgtctcggtagtgccgcagctgcaatacagaatgtatggtagcctcatcagacaaatggcccaggtagcacagaactacgaccaagatttcaggcagctcaagttattcattgcccaaaaccaaatccttggcagctatttgctgcagcagaacagggcatttgctgacagagaggtgcagatggagagctttcatgctgctgtcatttctcaaagaagggaggagttggacaatacattcgcaaagatggaccgactgagcttgcagatggaggaagaggacagagcaatggagcaagcccgaaaagaaatggaagaaggattgaagcagttccagaatgagcaagttgcaagggctgtgttcgctgttcttaaatctgtagctatgattgcgctcgcattcgtcacggctggtgcaacggctcctggagctgtggcgtcggcggggcaagctgtgagcatagcaggtcaggcggcgcaaggtctgcgaagggtggtggaaattctagaggggctcgaggctgtgatggaggttgtggctgctataaagcaccttgtggatgctctggaccaggtaagtcagattgtggatgcaccacctatgccagacatgccctcggaggcggactggagtatttttgtgaatgagattgaagccgtggcagaggggatgccgacggaagtctcggaggttccggtgtggaaggccaagtgcaagaatgtggctgcactgggtagggagatgtgcatcacggcagaacagatttcccagctccagtatgacatctgggtgcaaggcatgatgcgggatatggctcgaagccaggcagacaggctggccgcaattcaacccgcggaccttaccaactatttggagatggctacccagatggatatgcggactacgaggatactgatagggctcctcaacataatgcgcatccagaatgcggcgctcaggtacgagtatcttctaatgcccacggagctcacaacatggccactgggtatggataccgtgggtgacttgctcatcgcgcaggagaatgctgcactgtcaggattagctcagttagggcccccatcggacttcacgagcaggcatgtggtgaaagacatacctgtgagcttgcttctagacggtggggattgggaatttgagattcctgtgcaaggtggcatgtccagtttcccttccagctggactcgagtgcggattcggcacctggagatgcactttgtgcaggaggcgagcggtggcggcgagattatccaccagcctgccacccagacggggaccatttacatccttctgcagggctccactgtcttccatgatcgcagaagggaggaggtgatgacctttcaggcagcggttccgctcaactaccattacgcgtaccgcctcgacaccggcgactccactctcacaaacgaaccctctgaacagtttgccaacacattcatgcagatgacaccgttcactcactggaggctacgtctgtctgcgtccgcaaaagagaatgcaggattagcctttcccacggctacagcacttgactccaccactgagattgtcatcactttccatgttacggccatcagacaaattgactggcggcacgaggaggag

SEQ ID NO: 513 - DNA, 2556 bp, synthetic construct
  misc_feature 1..2556: note = Synthetic
  source 1..2556: mol_type = other DNA
atggattacagcacgctttacagggatctgaaccagataagcatgcccctggatcgggtagagttctcagaggtgatggtgatccacaggatgtatgtgaggctagctgatctgaatgtggggcagctcgagggagccgagaaagtgaagcggttgtatgtgttggcagacgtggtggagctcgcaacatttgcgcatccacagttgcttaatacgcggatgccaggatcggtgacggtgatcattctgtgtcgtcttcttcagtttccaactgatgggtcgttcgctgcttggctcgagctgccgttcatggagttgcacacactcatagaacaatacaggtcagagataaaagcagcagatgacgcgaaatggggaacgtatgtacacgcggaggaagtacagctcagcccgctgtttaatgggtggccttatctggttgttgaggcacagcgctgtattataaccgcggccatgcacaatacatttaaccgccctgggtgggttcgctccattactcaatttacaactgatcagtccggtcgggtagataccacactgctcgcacgaacagaattcggccatattgatctaccactcgaaacagattccccaacggcattcagtgtttcacaccgccaaagtacgaatttgcccgtagagtacaccggtattccagtggaggtggtgaccgatcctaacatcttgatgggcatgcagacaacggtacacattgcggagctagtcaaggcatgtcatccgtcacccgatgttgtgagcgctgtaggggtgcacctgaactggctcaacgaagtcttgctccgagttgtccagaaggaatctcagttgcaagggaccgaggcctacaacgagtgccttgcgcttttaggtcgcattcaatgtgtcatgaagatggggccgtttgtctcggtagtgccgcagctgcaatacagaatgtatggtagcctcatcagacaaatggcccaggtagcacagaactacgaccaagatttcaggcagctcaagttattcattgcccaaaaccaaatccttggcagctatttgctgcagcagaacagggcatttgctgacagagaggtgcagatggagagctttcattcagcggtcatttctcaaagaagggaggagttggacaatacattcgcaaagatggaccgattgagcgggcaaatggaggcagagagtagtgcaatggagcaagccaaaaaggaaatggaagaaggattgaggcagttccagaataggcaagttgcgaacgccctctttgccgttcttagcgctgtagctcagattgggcttgcattccttacggctggtgcaacggctcctggagctgtggcgtcggcggggcaagctgtgagcatagcaggtcaggcggcgcaaggtctgcgaagggtggtggaaattctagaggggctcgaggctgtgatggaggttgtggctgctgtgaaggacctcgtggattcattggaacaggtaggtcagattgtggacgcaccggtgatgccggaattgccctcagaggcggactggtccatttttgtgaacgaggtggaggccgtggcagagggcatgccaacggaagtctcggaggttccggtgtggaaagccaagtgcaagaatgtggctgcactgggtagggagatgtgcatcacggcagtacagatgtcggagctgcagtatgacatctgggtgcaaggcatgatgcgggatatggctcgaagccaggcagacaggctggccgcaattcaacccgcggaccttaccaactatttggagatggctacccagatggatatgcggactacgaggatactgatagggctcctcaacataatgcgcatccagaatgcggcacttatgtatgagtaccttctaacgcccacgcagctcactgcatggccgctgagaatggatactgtggccaacttgctcatcacgcacgagagtgctgcactgtcaggattagctcagttagggcccccatcggacttcacgagcaggcatgtggtgaaagacatacctgtgaacttgcttctagacggtggggattgggaatttgagattcctgtgcaaggtggcatgtccagtttcccttccagctggactcgcgtccgtattcggcacctggagatgcactttgtgcaggaggcgagcggtggcggcgagattatccaccagcctgccacccagactgggaccgtttacatccttctgcagggttccactatcttccatgatcgcagaagggaggaggtgatgacctttcaggcagcggttccgctcaactaccattacgcgtaccgcctcgacaccggcgactccactctcacaaacgaaccctctgaacagtttgccaacaagttcatgcagatgacacccttcacccgttggaggctacgtctgtctgcgtccgcaaaagagaatgcaggattagcctttcccacggctacagcacttgactccaccactgagattgccatcactttccatgttacggccatcagacaaattgactggcggcaagaggaggag

SEQ ID NO: 514 - DNA, 2560 bp, synthetic construct
  misc_feature 1..2560: note = Synthetic
  source 1..2560: mol_type = other DNA
atggattacagcacgctttacagggatctgaaccagataagcatgcccctggatcgggtagagttttcagaggtgatggtgatccacaggatgtatgtgaggctagctgatctgaatgtggggcagctcgagggagccgagaaagtgaagcggttgtatgtgttggcagacgtggtggagctcgcaacatttgcgcatccacagttgcttaatacgcggatgccaggatcggtgacggtgatcattctgtgtcgtcttcttcagtttccaactgatgggtcgttcgctgcttggctcgagctgccgttcatggagttgcacacactcatagaacaatacaggtcagagataaaagcagcagatgacgcgaaatggggaacgtatgtacacgcggaggaagtacagctcagcccgctgtttaatgggtggccttatctggttgttgaggcacagcgctgtattataaccgcggccatgcacaatacatttaaccgccctgggtgggttcgctccattactcaatttacaactgatcagtccggtcgggtagataccacactgctcgcacgaacagaattcggccatattgatctaccactcgaaacagattccccaacggcattcagtgtttcacaccgccaaagtacgaatttgcccgtagagtacaccggtattccagtggaggtggtgaccgatcctaacatcttgatgggcatgcagacaacggtacacattgcggagctagtcaaggcatgtcatccgtcacccgatgttgtgagcgctgtaggggtgcacgtgaattggctcaacgaagtcttgctccgagttgtccagaaggaatctcagttgcaagggaccgaggcctacaacgagtgccttgcgcttttaggtcgcattcaatgtgtcatgaagatggggccgtttgtctcggtagtgccgcagctgcaatacagaatgtatggtagcctcatcagacaaatggcccaggtagcacagaactacgaccaagatttcaggcagctcaagttattcattgcccaaaaccaaatccttggcagctatttgctgcagcagaacagggcatttgctgagagggagctgcagatggagagctttcatgctgctgtcatttctcaaagaagggaggagttggacaatacattcgcaaagatggaccgattgagcgggcaaatggaggcagagagtagtgcaatggagcaagccaaaaaggaaatggacgaaggattgaggcagttccagaataggcaagttgcgaacgccctctttgccgttcttagcgctgtagctcagattgggcttgcattccttacggctggtgcaacggctcctggagctgtggcgtcggcggggcaagctgtgagcatagcaggtcaggcggcgcaaggtctgcgaagggtggtggaaattctagaggggctcgaggctgtgatggaggttgtggctgctataaagcaccttgtggatgctctggaccaggtaagtcagattgtggatgcaccacctatgccagacatgccctcagaggcggactggtccatttttgtgaatgagattgaagccgtggcagaggggatgccgacggaagtctcggaggttccggcgtggaaggccaagtgcaagaatgtggctgcactgggtagggagatgtgcatcacggcagaacagatttcccagctccagtatgacatctgggtgcaaggcttgttgcgggatatggctcgaagccaggcagacaggctggccgcaattcaacccgcggaccttaccaactatttggagatggctacccagatggatatgcggactacgaggatgctgctggggctcctcaacataatgcgcatccagaatgcggcgctcatgtatgagtatcttctaatgcccacgcagctcacaacatggccactgggtatggataccgtgggtgacttgctcatcgcgcaggagaatgctgcactgtcaggattagctcagttagggcccccatcggacttcacgagcaggcatgtagtgaaaggcatacctgtgagcttgcttctagacggtggggattgggaatttgagattcctgtgcaaggtggcatgtccagtttcccttccagctggactcgagtgcggattcggcacctggagatgcactttgtgcaggaggcgagcggtggcggcgagattatccaccagcctaccacccagacggggaccatttacatcctcctgcagggctccactgtcttccatgaccgcagaagagaccaggtgttgccttttcaggccgctgctccgctcaactaccattacgcgtaccgcctcgacactggagaagccactctcacaaacgaaccctctgaacagtttgccaacaagttcatgcagatgacacccttcacccgttggaggcttcgtctgtctgcgtccgcaaaagagaatgcaggattagcctttcccacagctacagctcccgactccaccactgagattgccatcactttccatgttacggccattagacaaattgactggcggcaagaggaggagtagc

SEQ ID NO: 515 - DNA, 2556 bp, synthetic construct
  misc_feature 1..2556: note = Synthetic
  source 1..2556: mol_type = other DNA
atggattacagcacgctttacagggatctgaaccagataagcatgcccctggatcgggtagagttttcagaggtgatggtgatccacaggatgtatgtgaggctagctgatctgaatgtgggggagctccccggagccgagagggtgaagcggttgtatgtgttggcagacgtggtggagctcgcaacatttgcgcatccacagttgcttaatacgcggatgccaggatcggtgacggtgatcattctgtgtcgtcttcttcagtttccaactgatgggtcgttcgctgcttggctcgagctgccgttcttggagttgcacacactcatagaacaatacaggtcagagataaaagcagcagatgacgcgaaatggggaacgtatgtacacgcggaggaagtacagctcagcccgctgtttaatgggtggccttatctggttgttgaggcacagcgctgtattataaccgcggccatgcacaatacatttaaccgccctgggtgggttcgctccattactcaatttacaactgatcagtccggtcgggtagataccacactgctcgcacgaacagaattcggccatattgatctaccactcgaaacagattccccaacggcattcagtgtttcacaccgccaaagtacgaatttgcccgtagagtacaccggtattccagtggaggtggtgaccgatcctaacatcttgatgggcatgcaaaccagcgtgcacattgcggagctagtcaaggcatgtcatccgtcacccgatgttgtgagcgctgtaggggtgcacgtgaattggctcaacgaagtcttgctccgagttgtccagaaggaatctcagttgcaagggaccgaggcctacaacgagtgccttgcgcttttaggtcgcattcaatgtgtcatgaagatggggccgtttgtctcggtagtgccgcagctgcaatacagaatgtatggtagcctcatcagacaaatggcccaagtagcacaaaactacgaccgagaattcaagcaattcaaattattcatcatccaaaatcaaatccttggcagctatttgctgcagcagaacagggcatttgctgacagagaggtgcagatggagagctttcattcagcggtcatttctcaaagaagggaggagttggacaatacattcgcaaagatggaccgattgagcgggcaaatggaggcagagagtagtgcaatggagcaagccaaaaaggaaatggacgaaggattgaggcagttccagaataggcaagttgcgaacgccctctttgccgttcttagcgctgtagctcagattgggcttgcattccttacggctggtgcaacggctcctggagctgtggcgtcggcggggcaagctgtgagcatagcaggtcaggcggcacaagctctgcgaagggtggtggaaattctagaggggctcgaggctgtgatggaggttgtggctgctataaagcaccttgtggattcattggaacaggtaggtcagattgtggacgcaccggtgatgccggaattgccctcagaggcggactggtccatttttgtgaacgaggtggaggccgtggcagagggcatgccaacggaagtctcggaggttccggcgtggaaggccaagtgcaagaatgtggctgcactgggtcgggagatgtgcatcacggcagaacagatgtcggagctgcagtatgacatctgggtgcaaggcttgttgcgggatatggctcgaagccaggcagacaggctggccgcaattcaacccgcggaccttaccaactatttggagatggcaatacagatggatatgcggactacgaggatactgatagggctcctcaacatattgcgcatccagaatgcggcgctcaggtacgagtatcttctaacgcccacggagctcacaacatggccactgggtatggataccgtgggtgacttgctcatcacgcacgagagtgctgcactgtcaggattagctcagttagggcccccatcggacttcacgagcaggcatgtagtgaaaggcatacctgtgagcttgcttctagacggtggggattgggagtttgagattcctgtgcaaggtggcatgtccagtttcccttccagctggactcgagtgcggattcggcacctggagatgcactttgtgaaggaggcgagcggtggcggcgagattatccaccagcctaccacccagacggggaccatttacatcctcctgcagggctccactgtcttccatgatcgcagaagggaggaggtgatgacctttcaggcagcggttccgctcaactaccattacgcgtaccgcctcgacactggagaagccactcttacgaacgagccctcggaacagtttgccaacaagttcatgcagatgacaccgttcacacactggaggctacgtctgtctgcgtccgcagcggagaataaaggattagcctttcccacagctacagctcccgactccaccactgagattgccatcactttccatgttacggccattagacaaattgactggcggcaagaggaggag

SEQ ID NO: 516 - DNA, 2568 bp, synthetic construct
  misc_feature 1..2568: note = Synthetic
  source 1..2568: mol_type = other DNA
atggctctcgtggattacggcaagcttttcgaggatctgaaccagataagcatgggtgtactggatcgggtagagttttcagaggtgatggtaatccacaggatgtacttgaggttatctgatctgaatgtgggggagctccccggagccgagagggtgaagcggttgtatgtgttggcagacgtggtggagctcgcaacatttgcgcatccacagttgcttaatacgcggatgccaggatcggtgacggtgatcattctgtgtcgtcttcttcagtttccaactgatgggtcgttcgctgcttggctcgagctgccgttcatggagttgcacacactcatagaacaatacaggtcagagataaaagcagcagatgacgcgaaatggggaacgtatgtacacgcggaggaagtacagctcagcccgctgtttaatgggtggccttatctggttgttgaggcacagcgctgtattataaccgcggccatgcacaatacatttaaccgccctgggtgggttcgctccattactcaatttacaactgatcagtccggtcgggtagataccacactgctcgcacgaacagaattcggccatattgatctaccactcgaaacagattccccaacggcattcagtgtttcacaccgccaaagtacgaatttgcccgtagagtacaccggtattccagtggaggtggtgaccgatcctaacatcttgatgggcatgcaaaccagcgtgcacattgcggagctagtgaaggcatgttacccgtcacccgatgttgtgagcgctgtaggggagcacctgaactggctcaacgaagtcttgctccgagttgtccagaaggaatctcagttgcaagggaccgaggcctacaacgagtgccttgcgcttttaggtcgcattcaatgtgtcatgaagatggtgagaattggcttagtagtgccccagctgcaatacagaatgtatggtagcctcatcagacaaatggcccaggtagcacagaactacgaccaagatttcaggcagctcaagttattcattgcccaaaatcaaatccttggcagctatttgctgcagcagaacaaggcatttgctgagagggagctgcagatggagagctttcatgctgctgtcatttctcaaagaagggaggagttggacaatacattcgcaaagatggaccgattgagcgggcaaatggaggcagagagtagtgcaatggagcaagccaaaaaggaaatggacgaaggattgaggcagttccagaatgagcaagttgcaagggctgtgttcgctgttcttaaatctgtagctatgattgcgctcgcattcgtcacggctggtgcaacggctcctggagctgtggcgtcggcggggcaagctgtgaacatagccggtcaagcggcacaagctctgcgaagggtggtggaaattctagaggggctcgaggctgtgatggaggttgtggctgctgtgaaggacctcgtggattcattggaacaggtaggtcagattgtggacgcaccggtgatgccggaattgccctcggaggcggactggagtatttttgtgaatgagattgaagccgtggcagaggggatgccggcggaagtctcggaggttccggcgtggaaggccaagtgcaagaatgtggctgcactgggtagggagatgtgcatcacggcagtacagatgtcggagctgcagtatgacatctgggtgcaaggcatgatgcgggatatggctcgaagccaggcagacaggctggccgcaattcaacccgcggaccttaccaactatttggagatggctacccagatggatatgcggactacgaggatgctgctggggctcctcaacatattgcgcatccagaatgcggcgctcaggtacgagtatcttctaatgcccacggagctcacaacatggccactgggtatggataccgtgggtgacttgctcatcgcgcaggagaatgctgcactgataggattaatgcagctagggccctcatctgatttcacgagcaggcatgtagtgaaaggcatacctgtgagcttgcttctagacggtggggattgggaatttgagattcctgtgcaaggtggcatgtccagcttcccttccagctggtctcgcgtccgtattcggcacctggagatgcactttgtgcaggaggcgagcggtggcggcgagattatccaccagcctgccacccagacggggaccatttacatcctcctgcagggctccactgtcttccatgatcgcagaagggaggaggtgatgacctttcaggcagcggttccgctcaactaccattacgcgtaccgcctcgacactggagaagccactcttacgaacgagccctcggaacagtttgctaacacattcatgcagatgacaccgttcactcactggaggctacgtctgtctgcgtccgcaaaagagaatgcaggattagcctttcccacggctacagcacttgactccactacccagattgtcatcactttccatgttacggccatcagacaaattgactggcggcaagaggaggag

SEQ ID NO: 517 - DNA, 2575 bp, synthetic construct
  misc_feature 1..2575: note = Synthetic
  source 1..2575: mol_type = other DNA
atggctctcgtggattacggcaagcttttcgaggatctgaaccagataagcatgggtgtactggatcgggtagagttctcagaggtgatggtgatccacaggatgtatgtgaggctagctgatctgaatgtgggggagctccccggagccgagagggtgaagcggttgtatgtgttggcagacgtggtggagctcgcaacatttgcgcatccacagttgcttaatacgcggatgccaggatcggtgacggtgatcattctgtgtcgtcttcttcagtttccaactgatgggtcgttcgctgcttggctcgagctgccgttcatggagttgcacacactcatagaacaatacaggtcagagataaaagcagcagatgacgcgaaatggggaacgtatgtacacgcggaggaagtacagctcagcccgctgtttaatgggtggccttatctggttgttgaggcacagcgctgtattataaccgcggccatgcacaatacatttaaccgccctgggtgggttcgctccattactcaatttacaactgatcagtccggtcgggtagataccacactgctcgcacgaacagaattcggccatattgatctaccactcgaaacagattccccaacggcattcagtgtttcacaccgccaaagtacgaatttgcccgtagagtacaccggtattccagtggaggtggtgaccgatcctaacatcttgatgggcatgcaaaccagcgtgcacattgcggagctagtgaaggcatgttacccgtcaccagaattagtgagcgctgtaggggtgcacgtgaattggctcaacgaagtcttgctccgagttgtccagaaggaatctcagttgcaagggaccgaggcctacaacgagtgccttgcgcttttaggtcgcattcaatgtgtcatgaagatggggccgtttgtctcggtagtgccgcagctgcaatacagaatgtacggtagcctcatcagacaaatggcccaggtagcacagaactacgaccaagatttcaggcagctcaagttattcattgcccaaaaccaaatccttggcagctatttgctgcagcagaacagggcatttgctgagagggagctgcagatggagagctttcatgctgctgtcatttctcaaagaagggaggagttggacaatacattcgcaaagatggaccgattgagcgggcaaatggaggcagagagtagtgcaatggagcaagccaaaagggaaatggacgaaggattgaggcagttccagaataggcaagttgcgaacgccctctttgccgttcttagcgctgtagctcagattgggctcgcattcgtcacggctggtgcaacggctcctggagctgtggcgtcggcggggcaagctgtgagcatagccggtcaggcggcgcaaggtctgcgaagggtggtggaaattctagagcagctggaggctgtgatggaggttgtggctgctgtgaaggacctcgtggattcattggaacaggtaggtcagattgtggacgcaccggtgatgccggaattgccctcagaggcggactggtccatttttgtgaacgaggtggaggccgtggcagagggcatgccaacggaagtctcggaggttccggtgtggagggccaagtgcaagaatgtggctgcactgggtcgggagatgagcatcacggcagtacagatttcccagctccagtatgacatctgggtgcaaggcttgttgcgggatatagctcaaagccacgcagaccggctggcagcgattcaacctgctaatcttaccaactatttggagatggcaatacagatggatatgcggactacgaggatactgatagggctcctcaacataatgcgcatccagaatgcggcacttatgtatgagtaccttctaacgcccacgcagctcactgcatggccgctgagaatggatactgtggccaacttgctcatcacgcacgagagtgctgcactgtcaggattagctcagttagggcccccatcggacttcacgagcaggcatgtggtgaaaggcatacctgtgagcttgcttctagacggtggggattgggaatttgagattcctgtgcaaggtggcatgtccagtttcccttccagctggactcgcgtccgtattcggcacctggagatgcactttgtgcaggaggccagcggtattggtggtgagattatccaccagcctaccacccagacggggaccatttacatcctcctgcagggctccactgtcttccatgatcgcagaagggaggaggtgatgacctttcaggcagcggttccgctcaactaccattacgcgtaccgcctcgacactggagaagccactcttacgaacgagccctcggaacagtttgccaacacattcatgcagatgacaccgttcactcactggaggctacgtctgtctgcgtccgcagcggagaataaaggattagcctttcccacagctacagctcccgactccaccactgagattgccatcactttccatgttacggccattagacaaattgactggcggcacgacgaagagtagc

SEQ ID NO: 518 - protein, 852 aa, synthetic construct
  REGION 1..852: note = Synthetic
MDYSTLYRDLNQISMPLDRVEFSEVMVIHRMYLRLSDLNVGELPGAERVKRLYVLADVVELATFAHPQLLNTRMPGSVTVIILCRLLQFPTDGSFAAWLELPFMELHTLIEQYRSEIKAADDAKWGTYVHAEEVQLSPLFNGWPYLVVEAQRCIITAAMHNTFNRPGWVRSITQFTTDQSGRVDTTLLARTEFGHIDLPLETDSPTAFSVSHRQSTNLPVEYTGIPVEVVTDPNILMGMQTSVHIAELVKACYPSPELVSAVGVHVNWLNEVLLRVVQKESQLQGTEAYNECLALLGRIQCVMKMGPFVSVVPQLQYRMYGSLINQMAQVAQNYDREFKQFKLFIIQNQILGSYLLQQNRAFAERELQMESFHAAVISQRREELDNTFAKMDRLSGQMEAESSAMEQAKKEMDEGLRQFQNRQVANALFAVLSAVAQIGLAFLTAGATAPGAVASAGQAVSIAGQAAQGLRRVVEILEQLEAVMEVVAAVKDLVDALDQVSQIVDAPPMPDMPSEADWSIFVNEIEAVAEGMPTEVSEVPAWKAKCKNVAALGREMCITAEQISQLQYDIWVQGLLRDMARSQADRLAAIQPANLTNYLEMAIQMDMRTTRILIGLLNIMRIQNAALMYEYLLTPTQLTAWPLRMDTVANLLITHESAALSGLAQLGPPSDFTSRHVVKGIPVSLLLDGGDWEFEIPVQGGMSSFPSSWTRVRIRHLEMHFVQEASGGGEIIHQPATQTGTIYILLQGSTVFHDRRREEVMTFQAAVPLNYHYAYRLDTGEATLTNEPSEQFANTFMQMTPFTHWRLRLSASAAENKGLAFPTATAPDSTTEIAITFHVTAIRQIDWRQEEE

SEQ ID NO: 519 - protein, 853 aa, synthetic construct
  REGION 1..853: note = Synthetic
MDYSTLYRDLNQISMPLDRVEFSEVMVIHRMYLRLSDLNVGELPGAERVKRLYVLADVVELATFAHPQLLNTRMPGSVTVIILCRLLQFPTDGSFAAWLELPFMELHTLIEQYRSEIKAADDAKWGTYVHAEEVQLSPLFNGWPYLVVEAQRCIITAAMHNTFNRPGWVRSITQFTTDQSGRVDTTLLARTEFGHIDLPLETDSPTAFSVSHRQSTNLPVEYTGIPVEVVTDPNILMGMQTSVHIAELVKACYPSPELVSAVGVHVNWLNEVLLRVVQKESQLQGTEAYNECLALLGRIQCVMKMGPFVSVVPQLQYRMYGSLIRQMAQVAQNYDREFKQFKLFIIQNQILGSYLLQQNRAFAERELQMESFHAAVISQRREELDNTFAKMDRLSGQMEAESSAMEQAKKEMDEGLRQFQNRQVARAVFAVLKSVAMIALAFVTAGATAPGAAASAAQAVNIAGQAAQALRRVVEILEQLEAVMEVVAAIKHLVDALDQVSQIVDAPPMPDMPSEADWSIFVNEIEAVAEGMPTEVSEVPVWRAKCKNVAALGREMSITAVQMSELQYDIWVQGMMRDMARSQADRLAAIQPADLTNYLEMATQMDMRTTRMLLGLLNIMRIQNAALMYEYLLTPTQLTAWPLRMDTVANLLITHESAALSGLAQLGPPSDFTSRHVVKGIPVSLLLDGGDWEFEIPVQGGMSSFPSSWTRVRIRHLEMHFVKEASGIGGEIIHQPATQTGTIYILLQGSTVFHDRRREEVMTFQAAVPLNYHYAYRLDTGEATLTNEPSEQFANTFMQMTPFTHWRLRLSASAAENKGLAFPTATAPDSTTEIAITFHVTAIRQIDWRQEEE

SEQ ID NO: 520 - protein, 853 aa, synthetic construct
  REGION 1..853: note = Synthetic
MDYSTLYRDLNQISMPLDRVEFSEVMVIHRMYLRLSDLNVGELPGAERVKRLYVLADVVELATFAHPQLLNTRMPGSVTVIILCRLLQFPTDGSFAAWLELPFMELHTLIEQYRSEIKAADDAKWGTYVHAEEVQLSPLFNGWPYLVVEAQRCIITAAMHNTFNRPGWVRSITQFTTDQSGRVDTTLLARTEFGHIDLPLETDSPTAFSVSHRQSTNLPVEYTGIPVEVVTDPNILMGMQTSVQIAELVKACYPSPELVSAVGVHVNWLNEVLLRVVQKESQLQGTEAYNECLALLGRIQCVMKMGPFVSVVPQLQYRMYGSLIRQMAQVAQNYDQDFRQLKLFIAQNQILGSYLLQQNKAFADREVQMESFHSAVISQRRQELDDAIAKMDRLSLQMEEEDRAMEQARKEMEEGLKQFQNEQVARAVFAVLKSVAMIALAFVTAGATAPGAAASAAQAVNIAGQAAQALRRVVEILEGLEAVMEVVAAIKHLVDALDQVSQIVDAPPMPDMPSEADWSIFVNEIEAVAEGMPTEVSEVPAWKAKCKNVAALGREMSITAVQMSELQYDIWVQGLLRDIAQSHADRLAAIQPANLTNYLEMAIQMDMRTTRILIGLLNIMRIQNAALMYEYLLTPTQLTAWPLRMDTVANLLITHESAALSGLAQLGPPSDFTSRHVVKGIPVSLLLDGGDWEFEIPVQGGMSSFPSSWTRVRIRHLEMHFVKEASGIGGEIIHQPTTQTGTVYILLQGSTIFHDRRRDQVLPFQAAAPLNYHYAYRLDTGEATLTNEPSEQFANTFMQMTPFTHWRLRLSASAAENKGLAFPTATAPDSTTEIAITFHVTAIRQIDWRQEEE

SEQ ID NO: 521 - protein, 852 aa, synthetic construct
  REGION 1..852: note = Synthetic
MDYSTLYRDLNQISMPLDRVEFSEVMVIHRMYLRLSDLNVGELPGAERVKRLYVLADVVELATFAHPQLLNTRMPGSVTVIILCRLLQFPTDGSFAAWLELPFMELHTLIEQYRSEIKAADDAKWGTYVHAEEVQLSPLFNGWPYLVVEAQRCIITAAMHNTFNRPGWVRSITQFTTDQSGRVDTTLLARTEFGHIDLPLETDSPTAFSVSHRQSTNLPVEYTGIPVEVVTDPNILMGMQTSVHIAELVKACYPSPELVSAVGVHVNWLNEVLLRVVQKESQLQGTEAYNECLALLGRIQCVMKMGPFVSVVPQLQYRMYGSLIRQMAQVAQNYDQDFRQLKLFIAQNQILGSYLLQQNKAFADREVQMESFHSAVISQRRQELDDAIAKMDRLSLQMEEEDRAMEQARKEMEEGLKQFQNEQVARAVFAVLKSVAMIALAFVTAGATAPGAAASAAQAVNIAGQAAQALRRVVEILEQLEAVMEVVAAVKDLVDSLEQVGQIVDAPVMPELPSEADWSIFVNEVEAVAEGMPTEVSEVPVWRAKCKNVAALGREMSITAVQMSELQYDIWVQGLLRDIAQSHADRLAAIQPANLTNYLEMAIQMDMRTTRILIGLLNIMRIQNAALMYEYLLTPTQLTAWPLRMDTVANLLITHESAALSGLAQLGPPSDFTSRHVVKGIPVSLLLDGGDWEFEIPVQAGMSSFPSSWTRVRIRHLEMHFVQEASGGGEIIHQPATQTGTIYILLQGSTVFHDRRREEVMTFQAAVPLNYHYAYRLDTGEATLTNEPSEQFANTFMQMTPFTHWRLRLSASAAENKGLAFPTATAPDSTTEIAITFHVTAIRQIDWRQEEE

SEQ ID NO: 522 - protein, 851 aa, synthetic construct
  REGION 1..851: note = Synthetic
MDYSTLYRDLNQISMPLDRVEFSEVMVIHRMYLRLSDLNVGELPGAERVKRLYVFADVVELATFAHPQLLNTRMPGSVTVIILCRLLQFPTDGSFAAWLELPFMELHTLIEQYRSEIKAADDAKWGTYVHAEEVQLSPLFNGWPYLVVEAQRCIITAAMHNTFNRPGWVRSITQFTTDQSGRVDTTLLARTEFGHIDLPLETDSPTAFSVSHRQSTNLPVEYTGIPVEVVTDPNILMGMQTTVHIAELVKACHPSPDVVSAVGEHLNWLNKLLLPLKESTQLQGSESYKECLALLGRVHAAMKMVRIGLVVPQLQYRMYGSLINQMAQVAQNYDREFKQFKLFIIQNQILGSYLLQQNRAFAERELQMESFHSAVISQRRQELDDAIAKMDRLSLQMEEEDRAMEQARKEMEEGLKQFQNEQVARAVFAVLKSVAMIALAFVTAGATAPGAVASAGQAVSIAGQAAQGLRRVVEILEGLEAVMEVVAAIKHLVDALDQVSQIVDAPPMPDMPSEADWSIFVNEIEAVAEGMPTEVSEVPAWKAKCKNVAALGREMCITAEQISQLQYDIWVQGLLRDIAQSHADRLAAIQPANLTNYLEMAIQMDMRTTRILIGLLNIMRIQNAALMYEYLLTPTQLTAWPLRMDTVANLLITHESAALSGLAQLGPPSDFTSRHVVKGIPVSLLLDGGDWEFEIPVQGGMSSFPSSWTRVRIRHLEMHFVQEASGGGEIIHQPATQTGTIYILLQGSTIFHDRRRDQVLPFQAAAPLNYHYAYRLDTGDSTLTNEPSEQFANKFMQMTPFTRWRLRLSASAAENKGLAFPTATAPDSTTEIAITFHVTAIRQIDWRQEEE

SEQ ID NO: 523 - protein, 853 aa, synthetic construct
  REGION 1..853: note = Synthetic
MDYSTLYRDLNQISMPLDRVEFSEVMVIHRMYLRLSDLNVGELPGAERVKRLYVLADVVELATFAHPQLLNTRMPGSVTVIILCRLLQFPTDGSFAAWLELPFMELHTLIEQYRSEIKAADDAKWGTYVHAEEVQLSPLFNGWPYLVVEAQRCIITAAMHNTFNRPGWVRSITQFTTDQSGRVDTTLLARTEFGHIDLPLETDSPTAFSVSHRQSTNLPVEYTGIPVEVVTDPNILMGMQTSVHIAELVKACHPSPDVVSAVGVHVNWLNEVLLRVVQKESQLQGTEAYNECLALLGRIQCVMKMGPFVSVVPQLQYRMYGSLIRQMAQVAQNYDQDFRQLKLFIAQNQILGSYLLQQNKAFADREVQMESFHSAVISQRRQELDDAIAKMDRLSLQMEEEDRAMEQARKEMEEGLKQFQNEQVARAVFAVLKSVAMIALAFVTAGATAPGAAASAAQAVNIAGQAAQALRRVVEILEQLEAVMEVVAAVKDLVDSLDQVGQIVDAPVMPELPSEADWSIFVNEVEAVAEGMPTEVSEVPAWKAKCKNVAALGREMCITAEQISQLQYDIWVQGLLRDIAQSHADRLAAIQPANLTNYLEMAIQMDMRTTRILIGLLNIMRIQNAALMYEYLLTPTQLTAWPLRMDTVANLLITHESAALSGLAQLGPPSDFTSRHVVKDIPVNLLLDGEDWEFEIPVQAGMSSFPSSWSRVRIRHLEMHFVKEASGIGGEIIHQPTTQTGTVYILLQGSTIFHDRRRDQVLPFQAAAPLNYHYAYRLDTGDSTLTNEPSEQFANKFMQMTPFTRWRLRLSASAKENAGLAFPTATALDSTTQIVITFHVTAIRQIDWRHDEE

SEQ ID NO: 524 - protein, 853 aa, synthetic construct
  REGION 1..853: note = Synthetic
MDYSTLYRDLNQISMPLDRVEFSEVMVIHRMYLRLSDLNVGELPGAEKVKRLYVLADVVELATFAHPQLLNTRMPGSVTVIILCRLLQFPTDGSFAAWLELPFMELHTLIEQYRSEIKAADDAKWGTYVHAEEVQLSPLFNGWPYLVVEAQRCIITAAMHNTFNRPGWVRSITQFTTDQSGRVDTTLLARTEFGHIDLPLETDSPTAFSVSHRQSTNLPVEYTGIPVEVVTDPNILMGMQTSVHIAELVKACYPSPELVSAVGVHVNWLNEVLLRVVQKESQLQGTEAYNECLALLGRIQCVMKMGPFVSVVPQLQYRMYGSLIRQMAQVAQNYDQDFRQLKLFIAQNQILGSYLLQQNKAFADREVQMESFHSAVISQRRQELDDAIAKMDRLSLQMEEEDRAMEQAKKEMDEGLRQFQNRQVANALFAVLSAVAQIGLAFLTAGATAPGAVASAGQAVSIAGQAAQGLRRVVEILEQLEAVMEVVAAIKHLVDALDQVSQIVDAPPMPDMPSEADWSIFVNEIEAVAEGMPTEVSEVPAWKAKCKNVAALGREMCITAEQISQLQYDIWVQGLLRDIAQSQADRLAAIQPADLTNYLEMATQMDMRTTRMLLGLLNILRIQNAALRYEYLLMPTELTTWPLGMDTVGDLLIAQENAALIGLMQLGPSSDFTSRHVVKDIPVNLLLDGEDWEFEIPVQAGMSSFPSSWSRVRIRHLEMHFVKEASGIGGEIIHQPTTQTGTVYILLQGSTIFHDRRRDQVLPFQAAAPLNYHYAYRLDTGEATLTNEPSEQFANTFMQMTPFTHWRLRLSASAAENKGLAFPTATAPDSTTEIAITFHVTAIRQIDWRQEEE

SEQ ID NO: 525 - protein, 853 aa, synthetic construct
  REGION 1..853: note = Synthetic
MDYSTLYRDLNQISMPLDRVEFSEVMVIHRMYVRLADLNVGELPGAEKVKRLYVLADVVELATFAHPQLLNTRMPGSVTVIILCRLLQFPTDGSFAAWLELPFMELHTLIEQYRSEIKAADDAKWGTYVHAEEVQLSPLFNGWPYLVVEAQRCIITAAMHNTFNRPGWVRSITQFTTDQSGRVDTTLLARTEFGHIDLPLETDSPTAFSVSHRQSTNLPVEYTGIPVEVVTDPNILMGMQTSVHIAELVKACYPSPELVSAVGVHVNWLNEVLLRVVQKESQLQGTEAYNECLALLGRIQCVMKMGPFVSVVPQLQYRMYGSLIRQMAQVAQNYDQDFRQLKLFIAQNQILGSYLLQQNKAFADREVQMESFHSAVISQRRQELDDAIAKMDRLSLQMEEEDRAMEQARKEMEEGLKQFQNEQVARAVFAVLKSVAMIALAFVTAGATAPGAAASAAQAVNIAGQAAQALRRVVEILEQLEAVMEVVAAVKDLVDSLEQVGQIVDAPVMPELPSEADWSIFVNEVEAVAEGMPTEVSEVPAWKAKCKNVAALGREMSITAEQISQLQYDIWVQGLLRDIAQSHADRLAAIQPANLTNYLEMAIQMDMRTTRILIGLLNIMRIQNAALMYEYLLTPTQLTAWPLRMDTVANLLITHESAALSGLAQLGPPSDFTSRHVVKGIPVSLLLDGGDWEFEIPVQGGMSSFPSSWTRVRIRHLEMHFVKEASGIGGEIIHQPTTQTGTIYILLQGSTVFHDRRREEVMTFQAAVPLNYHYAYRLDTGDSTLTNEPSEQFANKFMQMTPFTRWRLRLSASAKENAGLAFPTATALDSTTQIVITFHVTAIRQIDWRHDEE

SEQ ID NO: 526 - protein, 852 aa, synthetic construct
  REGION 1..852: note = Synthetic
MDYSTLYRDLNQISMPLDRVEFSEVMVIHRMYLRLSDLNVGELPGAERVKRLYVLADVVELATFAHPQLLNTRMPGSVTVIILCRLLQFPTDGSFAAWLELPFMELHTLIEQYRSEIKAADDAKWGTYVHAEEVQLSPLFNGWPYLVVEAQRCIITAAMHNTFNRPGWVRSITQFTTDQSGRVDTTLLARTEFGHIDLPLETDSPTAFSVSHRQSTNLPVEYTGIPVEVVTDPNILLGMQTSVHIAELVKACYPSPELVSAVGVHVNWLNKLLLPLKESTQLQGSESYKECLALLGRVHAAMKMVRIGLVVPQLQYRMYGSLINQMAQVAQNYDREFKQLKLFIAQNQILGSYLLQQNRAFAERELQMESFHSAVISQRRQELDDAIAKMDRLSLQMEEEDRAMEQARKEMEEGLKQFQNEQVARAVFAVLKSVAMIALAFVTAGATAPGAAASAAQAVNIAGQAAQALRRVVEILEGLEAVMEVVAAIKHLVDALDQVSQIVDAPPMPDMPSEADWSIFVNEIEAVAEGMPTEVSEVPAWKAKCKNVAALGREMCITAEQISQLQYDIWVQGLLRDIAQSHADRLAAIQPANLTNYLEMAIQMDMRTTRILIGLLNIMRIQNAALMYEYLLTPTQLTAWPLRMDTVANLLITHESAALSGLAQLGPPSDFTSRHVVKGIPVSLLLDGGDWEFEIPVQGGMSSFPSSWTRVRIRHLEMHFVQEASGIGGEIIHQPATQTGTIYILLQGSTVFHDRRREEVMTFQAAVPLNYHYAYRLDTGEATLTNEPSEQFANTFMQMTPFTHWRLRLSASAAENKGLAFPTATAPDSTTEIAITFHVTAIRQIDWRQEEE

SEQ ID NO: 527 - protein, 834 aa, synthetic construct
  REGION 1..834: note = Synthetic
MDYSTLYRDLNQISMPLDRVEFSEVMVIHRMYLRLSDLNVGELPGAERVKRLYVLADVVELATFAHPQLLNTRMPGSVTVIILCRLLQFPTDGSFAAWLELPFMELHTLIEQYRSEIKAADDAKWGTYVHAEEVQLSPLFNGWPYLVVEAQRCIITAAMHNTFNRPGWVRSITQFTTDQSGRVDTTLLARTEFGHIDLPLETDSPTAFSVSHRQSTNLPVEYTGIPVEVVTDPNILMGMQTSVHIAELVKACYPSPELVSAVGVHVNWLNEVLLRVVQKESQLQGTEAYNECLALLGRIQCVMKMGPFVSVVPQLQYRMYGSLIRQMAQVAQNYDQDFRQLKLFIAQNQILGSYLLQQNKAFADREVQMESFHSAVISQRRQELDDAIAKMDRLSLQMEEEDRAMEQARKEMEEGLKQFQNEQVARAMFTACAADAAAQAVSIAGQAAQGLRRVVEILEQLEAVMEVVAAIKHLVDALDQVSQIVDAPVMPELPSEADWSIFVNEVEAVAEGMPTEVSEVPVWRAKCKNVAALGREMCITAEQISQLQYDIWVQGLLRDIAQSHADRLAAIQPANLTNYLEMAIQMDMRTTRILIGLLNIMRIQNAALMYEYLLTPTELTTWPLGMDTVGDLLIAQENAALIGLMQLGPSSDFTSRHVVKDIPVNLLLDGEDWEFEIPVQAGMSSFPSSWSRVRIRHLEMHFVKEASGIGGEIIHQPTTQTGTVYILLQGSTIFHDRRRDQVLPFQAAAPLNYHYAYRLDTGEATLTNEPSEQFANTFMQMTPFTHWRLRLSASAAENKGLAFPTATAPDSTTEIAITFHVTAIRQIDWRQEEE

SEQ ID NO: 528 - protein, 853 aa, synthetic construct
  REGION 1..853: note = Synthetic
MDYSTLYRDLNQISMPLDRVEFSEVMVIHRMYLRLSDLNVGELPGAERVKRLYVLADVVELATFAHPQLLNTRMPGSVTVIILCRLLQFPTDGSFAAWLELPFMELHTLIEQYRSEIKAADDAKWGTYVHAEEVQLSPLFNGWPYLVVEAQRCIITAAMHNTFNRPGWVRSITQFTTDQSGRVDTTLLARTEFGHIDLPLETDSPTAFSVSHRQSTNLPVEYTGIPVEVVTDPNILMGMQTSVHIAELVKACYPSPELVSAVGVHVNWLNEVLLRVVQKESQLQGTEAYNECLALLGRIQCVMKMVRIGLVVPQLQYRMYGSLINQMAQVAQNYDREFKQFKLFIIQNQILGSYLLQQNRAFAERELQMESFHAAVISQRREELDNTFAKMDRLSGQMEAESSAMEQAKKEMDEGLRQFQNRQVANALFAVLSAVAQIGLAFLTAGATAPGAVASAGQAVSIAGQAAQGLRRVVEILEQLEAVMEVVAAVKDLVDSLEQVGQIVDAPVMPELPSEADWSIFVNEIEAVAEGMPTEVSEVPAWKAKCKNVAALGREMCITAEQISQLQYDIWVQGLLRDIAQSHADRLAAIQPANLTNYLEMAIQMDMRTTRILIGLLNIMRIQNAALMYEYLLTPTELTTWPLGMDTVGDLLIAQENAALIGLMQLGPSSDFTSRHVVKDIPVNLLLDGEDWEFEIPVQAGMSSFPSSWSRVRIRHLEMHFVKEASGIGGEIIHQPTTQTGTVYILLQGSTIFHDRRRDQVLPFQAAAPLNYHYAYRLDTGDSTLTNEPSEQFANKFMQMTPFTRWRLRLSASAKENAGLAFPTATALDSTTQIVITFHVTAIRQIDWRHDEE

SEQ ID NO: 529 - protein, 853 aa, synthetic construct
  REGION 1..853: note = Synthetic
MDYSTLYRDLNQISMPLDRVEFSEVMVIHRMYLRLSDLNVGELPGAEKVKRLYVLADVVELATFAHPQLLNTRMPGSVTVIILCRLLQFPTDGSFAAWLELPFMELHTLIEQYRSEIKAADDAKWGTYVHAEEVQLSPLFNGWPYLVVEAQRCIITAAMHNTFNRPGWVRSITQFTTDQSGRVDTTLLARTEFGHIDLPLETDSPTAFSVSHRQSTNLPVEYTGIPVEVVTDPNILMGMQTSVHIAELVKACYPSPELVSAVGVHVNWLNEVLLRVVQKESQLQGTEAYNECLALLGRIQCVMKMGPFVSVVPQLQYRMYGSLIRQMAQVAQNYDQDFRQLKLFIAQNQILGSYLLQQNRAFAERELQMESFHAAVISQRREELDNTFAKMDRLSGQMEAESSAMEQAKKEMDEGLRQFQNRQVANALFAVLSAVAQIGLAFLTAGATAPGAVASAGQAVSIAGQAAQGLRRVVEILEQLEAVMEVVAAVKDLVDSLEQVGQIVDAPVMPELPSEADWSIFVNEVEAVAEGMPTEVSEVPVWRAKCKNVAALGREMCITAEQISQLQYDIWVQGLLRDIAQSHADRLAAIQPADLTNYLEMATQMDMRTTRMLLGLLNILRIQNAALRYEYLLMPTELTTWPLGMDTVGDLLIAQENAALIGLMQLGPSSDFTSRHVVKDIPVNLLLDGEDWEFEIPVQAGMSSFPSSWSRVRIRHLEMHFVKEASGIGGEIIHQPTTQTGTVYILLQGSTIFHDRRRDQVLPFQAAAPLNYHYAYRLDTGDSTLTNEPSEQFANKFMQMTPFTRWRLRLSASAAENKGLAFPTATAPDSTTEIAITFHVTAIRQIDWRQEEE

SEQ ID NO: 530 - protein, 853 aa, synthetic construct
  REGION 1..853: note = Synthetic
MDYSTLYRDLNQISMPLDRVEFSEVMVIHRMYLRLSDLNVGELPGAERVKRLYVLADVVELATFAHPQLLNTRMPGSVTVIILCRLLQFPTDGSFAAWLELPFMELHTLIEQYRSEIKAADDAKWGTYVHAEEVQLSPLFNGWPYLVVEAQRCIITAAMHNTFNRPGWVRSITQFTTDQSGRVDTTLLARTEFGHIDLPLETDSPTAFSVSHRQSTNLPVEYTGIPVEVVTDPNILMGMQTSVHIAELVKACYPSPELVSAVGEHVNWLNEVLLRVVQKESQLQGTEAYNECLALLGRIQCVMKMGPFVSVVPQLQYRMYGSLINQMAQVAQNYDREFKQFKLFIIQNQILGSYLLQQNRAFAERELQMESFHAAVISQRREELDNTFAKMDRLSGQMEAESSAMEQAKKEMDEGLRQFQNRQVANALFAVLSAVAQIGLAFLTAGATAPGAVASAGQAVSIAGQAAQGLRRVVEILEGLEAVMEVVAAVKDLVDSLEQVGQIVDAPVMPELPSEADWSIFVNEVEAVAEGMPTEVSEVPVWRAKCKNVAALGREMCITAEQISQLQYDIWVQGLLRDIAQSHADRLAAIQPANLTNYLEMATQMDMRTTRMLLGLLNILRIQNAALRYEYLLMPTELTTWPLGMDTVGDLLIAQENAALIGLMQLGPSSDFTSRHVVKDIPVNLLLDGEDWEFEIPVQAGMSSFPSSWSRVRIRHLEMHFVKEASGIGGEIIHQPTTQTGTVYILLQGSTIFHDRRRDQVLPFQAAAPLNYHYAYRLDTGDSTLTNEPSEQFANKFMQMTPFTRWRLRLSASAKENAGLAFPTATALDSTTQIVITFHVTAIRQIDWRHDEE

SEQ ID NO: 531 - protein, 853 aa, synthetic construct
  REGION 1..853: note = Synthetic
MDYSTLYRDLNQISMPLDRVEFSEVMVIHRMYLRLSDLNVGELPGAERVKRLYVLADVVELATFAHPQLLNTRMPGSVTVIILCRLLQFPTDGSFAAWLELPFMELHTLIEQYRSEIKAADDAKWGTYVHAEEVQLSPLFNGWPYLVVEAQRCIITAAMHNTFNRPGWVRSITQFTTDQSGRVDTTLLARTEFGHIDLPLETDSPTAFSVSHRQSTNLPVEYTGIPVEVVTDPNILMGMQTSVHIAELVKACYPSPELVSAVGVHVNWLNEVLLRVVQKESQLQGTEAYNECLALLGRIQCVMKMGPFVSVVPQLQYRMYGSLIRQMAQVAQNYDQDFRQLKLFIAQNQILGSYLLQQNKAFADREVQMESFHSAVISQRRQELDDAIAKMDRLSLQMEEEDRAMEQARKEMEEGLKQFQNEQVARAVFAVLKSVAMIALAFVTAGATAPGAAASAAQAVNIAGQAAQALRRVVEILEGLEAVMEVVAAVKDLVDSLEQVGQIVDAPVMPELPSEADWSIFVNEVEAVAEGMPTEVSEVPVWKAKCKNVAALGREMSITAVQMSELQYDIWVQGMMRDMARSQADRLAAIQPADLTNYLEMATQMDMRTTRMLLGLLNILRIQNAALRYEYLLMPTELTTWPLGMDTVGDLLIAQENAALIGLMQLGPSSDFTSRHVVKDIPVNLLLDGEDWEFEIPVQAGMSSFPSSWSRVRIRHLEMHFVKEASGIGGEIIHQPTTQTGTVYILLQGSTIFHDRRRDQVLPFQAAAPLNYHYAYRLDTGEATLTNEPSEQFANTFMQMTPFTHWRLRLSASAAENKGLAFPTATAPDSTTEIAITFHVTAIRQIDWRQEEE

SEQ ID NO: 532 - protein, 853 aa, synthetic construct
  REGION 1..853: note = Synthetic
MDYSTLYRDLNQISMPLDRVEFSEVMVIHRMYLRLSDLNVGQLEGAERVKRLYVFADVVELATFAHPQLLNTRMPGSVTVIILCRLLQFPTDGSFAAWLELPFMELHTLIEQYRSEIKAADDAKWGTYVHAEEVQLSPLFNGWPYLVVEAQRCIITAAMHNTFNRPGWVRSITQFTTDQSGRVDTTLLARTEFGHIDLPLETDSPTAFSVSHRQSTNLPVEYTGIPVEVVTDPNILMGMQTSVHIAELVKACYPSPELVSAVGVHVNWLNEVLLRVVQKESQLQGTEAYNECLALLGRIQCVMKMGPFVSVVPQLQYRMYGSLINQMAQVAQNYDREFKQFKLFIIQNQILGSYLLQQNRAFADREVQMESFHSAVISQRRQELDDAIAKMDRLSLQMEEEDRAMEQARKEMEEGLKQFQNEQVARAVFAVLSAVAQIGLAFLTAGATAPGAVASAGQAVSIAGQAAQGLRRVVEILEGLEAVMEVVAAIKHLVDALDQVSQIVDAPPMPDMPSEADWSIFVNEIEAVAEGMPTEVSEVPAWKAKCKNVAALGREMCITAEQISQLQYDIWVQGLLRDIAQSHADRLAAIQPANLTNYLEMAIQMDMRTTRILIGLLNIMRIQNAALMYEYLLTPTQLTAWPLRMDTVANLLITHESAALSGLAQLGPPSDFTSRHVVKGIPVSLLLDGGDWEFEIPVQAGMSSFPSSWSRVRIRHLEMHFVKEASGIGGEIIHQPATQTGTVYILLQGSTIFHDRRRDQVLPFQAAAPLNYHYAYRLDTGDSTLTNEPSEQFANKFMQMTPFTRWRLRLSASAKENAGLAFPTATALDSTTQIVITFHVTAIRQIDWRHDEE

SEQ ID NO: 533 - protein, 852 aa, synthetic construct
  REGION 1..852: note = Synthetic
MDYSTLYRDLNQISMPLDRVEFSEVMVIHRMYLRLSDLNVGELPGAERVKRLYVLADVVELATFAHPQLLNTRMPGSVTVIILCRLLQFPTDGSFAAWLELPFMELHTLIEQYRSEITAADDAKWGTYVHAEEVQLSPLFNGWPYLVVEAQRCIITAAMHNTFNRPGWVRSITQFTTDQSGRVDTTLLARTEFGHIDLPLETDSPTAFSVSHRQSTNLPVEYTGIPVEVVTDPNILMGMQTSVHIAELVKACYPSPELVSAVGEHVNWLNEVLLRVVQKESQLQGTEAYNECLALLGRIQCVMKMGPFVSVVPQLQYRMYGSLIRQMAQVAQNYDQDFRQLKLFIAQNQILGSYLLQQNKAFADREVQMESFHSAVISQRRQELDDAIAKMDRLSLQMEEEDRAMEQARKEMEEGLKQFQNEQVARAVFAVLKSVAMIALAFVTAGATAPGAAASAAQAVNIAGQAAQALRRVVEILEGLEAVMEVVAAIKHLVDALDQVSQIVDAPPMPDMPSEADWSIFVNEIEAVAEGMPTEVSEVPVWRAKCKNVAALGREMSITAVQMSELQYDIWVQGMMRDMARSQADRLAAIQPADLTNYLEMATQMDMRTTRMLLGLLNIMRIQNAALMYEYLLTPTQLTAWPLRMDTVANLLITHESAALSGLAQLGPPSDFTSRHVVKGIPVSLLLDGGDWEFEIPVQGGMSSFPSSWTRVRIRHLEMHFVQEASGGGEIIHQPATQTGTIYILLQGSTVFHDRRREEVMTFQAAVPLNYHYAYRLDTGEATLTNEPSEQFANTFMQMTPFTHWRLRLSASAAENKGLAFPTATAPDSTTEIAITFHVTAIRQIDWRQEEE

SEQ ID NO: 534 - protein, 852 aa, synthetic construct; identical to SEQ ID NO: 521
  REGION 1..852: note = Synthetic

SEQ ID NO: 535 - protein, 852 aa, synthetic construct
  REGION 1..852: note = Synthetic
MDYSTLYRDLNQISMPLDRVEFSEVMVIHRMYLRLSDLNVGELPGAERVKRLYVFADVVELATFAHPQLLNTRMPGSVTVIILCRLLQFPTDGSFAAWLELPFMELHTLIEQYRSEIKAADDAKWGTYVHAEEVQLSPLFNGWPYLVVEAQRCIITAAMHNTFNRPGWVRSITQFTTDQSGRVDTTLLARTEFGHIDLPLETDSPTAFSVSHRQSTNLPVEYTGIPVEVVTDPNILMGMQTSVHIAELVKACYPSPELVSAVGVHVNWLNEVLLRVVQKESQLQGTEAYNECLALLGRIQCVMKMGPFVSVVPQLQYRMYGSLIRQMAQVAQNYDQDFRQLKLFIAQNQILGSYLLQQNKAFADREVQMESFHSAVISQRRQELDDAIAKMDRLSLQMEEEDRAMEQARKEMEEGLKQFQNEQVARAVFAVLKSVAMIALAFVTAGATAPGAAASAAQAVNIAGQAAQALRRVVEILEGLEAVMEVVAAIKHLVDALDQVSQIVDAPPMPDMPSEADWSIFVNEIEAVAEGMPTEVSEVPAWKAKCKNVAALGREMSITAVQMSELQYDIWVQGMMRDMARSQADRLAAIQPADLTNYLEMATQMDMRTTRMLLGLLNIMRIQNAALMYEYLLTPTQLTAWPLRMDTVANLLITHESAALSGLAQLGPPSDFTSRHVVKGIPVSLLLDGGDWEFEIPVQGGMSSFPSSWTRVRIRHLEMHFVQEASGGGEIIHQPATQTGTIYILLQGSTVFHDRRREEVMTFQAAVPLNYHYAYRLDTGEATLTNEPSEQFANKFMQMTPFTRWRLRLSASAKENVGLAFPTATALDSTTEIAITFHVTAIRQIDWRQEEE

SEQ ID NO: 536 - protein, 853 aa, synthetic construct
  REGION 1..853: note = Synthetic
MDYSTLYRDLNQISMPLDRVEFSEVMVIHRMYLRLSDLNVGELPGAERVKRLYVLADVVELATFAHPQLLNTRMPGSVTVIILCRLLQFPTDGSFAAWLELPFMELHTLIEQYRSEIKAADDAKWGTYVHAEEVQLSPLFNGWPYLVVEAQRCIITAAMHNTFNRPGWVRSITQFTTDQSGRVDTTLLARTEFGHIDLPLETDSPTAFSVSHRQSTNLPVEYTGIPVEVVTDPNILMGMQTSVHIAELVKACYPSPELVSAVGEHLNWLNEVLLRVVQKESQLQGTEAYNECLALLGRIQCVMKMGPFVSVVPQLQYRMYGSLIRQMAQVAQNYDQDFRQLKLFIAQNQILGSYLLQQNKAFADREVQMESFHSAVISQRRQELDDAIAKMDRLSLQMEEEDRAMEQARKEMEEGLKQFQNEQVARAVFAVLKSVAMIALAFVTAGATAPGAAASAAQAVNIAGQAAQALRRVVEILEGLEAVMEVVAAVKDLVDSLEQVGQIVDAPVMPELPSEADWSIFVNEVEAVAEGMPTEVSEVPVWRAKCKNVAALGREMSITAVQMSELQYDIWVQGMMRDMARSQADRLAAIQPADLTNYLEMATQMDMRTTRMLLGLLNILRIQNAALRYEYLLMPTELTTWPLGMDTVGDLLIAQENAALIGLMQLGPSSDFTSRHVVKDIPVNLLLDGEDWEFEIPVQAGMSSFPSSWSRVRIRHLEMHFVKEASGIGGEIIHQPTTQTGTIYILLQGSTVFHDRRREEVMTFQAAVPLNYHYAYRLDTGEATLTNEPSEQFANTFMQMTPFTHWRLRLSASAAENKGLAFPTATAPDSTTEIAITFHVTAIRQIDWRQEEE

SEQ ID NO: 537 - protein, 852 aa, synthetic construct
  REGION 1..852: note = Synthetic
MDYSTLYRDLNQISMPLDRVEFSEVMVIHRMYLRLSDLNVGELPGAERVKRLYVLADVVELATFAHPQLLNTRMPGSVTVIILCRLLQFPTDGSFAAWLELPFMELHTLIEQYRSEIKAADDAKWGTYVHAEEVQLSPLFNGWPYLVVEAQRCIITAAMHNTFNRPGWVRSITQFTTDQSGRVDTTLLARTEFGHIDLPLETDSPTAFSVSHRQSTNLPVEYTGIPVEVVTDPNILMGMQTSVHIAELVKACYPSPELVSAVGVHVNWLNEVLLRVVQKESQLQGTEAYNECLALLGRIQCVMKMGPFVSVVPQLQYRMYGSLIRQMAQVAQNYDQDFRQLKLFIAQNQILGSYLLQQNKAFADREVQMESFHSAVISQRRQELDDAIAKMDRLSLQMEEEDRAMEQARKEMEEGLKQFQNRQVANALFAVLSAVAQIGLAFLTAGATAPGAAASAAQAVNIAGQAAQGLRRVVEILEQLEAVMEVVAAVKDLVDSLEQVGQIVDAPVMPELPSEADWSIFVNEVEAVAEGMPTEVSEVPVWRAKCKNVAALGREMCITAEQISQLQYDIWVQGLLRDIAQSHADRLAAIQPANLTNYLEMAIQMDMRTTRILIGLLNIMRIQNAALMYEYLLTPTQLTAWPLRMDTVANLLITHESAALSGLAQLGPPSDFTSRHVVKGIPVSLLLDGGDWEFEIPVQGGMSSFPSSWTRVRIRHLEMHFVQEASGGGEIIHQPATQTGTIYILLQGSTVFHDRRREEVMTFQAAVPLNYHYAYRLDTGEATLTNEPSEQFANTFMQMTPFTHWRLRLSASAAENKGLAFPTATAPDSTTEIAITFHVTAIRQIDWRHDEE

SEQ ID NO: 538 - protein, 853 aa, synthetic construct
  REGION 1..853: note = Synthetic
MDYSTLYRDLNQISMPLDRVEFSEVMVIHRMYLRLSDLNVGELPGAERVKRLYVLADVVELATFAHPQLLNTRMPGSVTVIILCRLLQFPTDGSFAAWLELPFMELHTLIEQYRSEIKAADDAKWGTYVHAEEVQLSPLFNGWPYLVVEAQRCIITAAMHNTFNRPGWVRSITQFTTDQSGRVDTTLLARTEFGHIDLPLETDSPTAFSVSHRQSTNLPVEYTGIPVEVVTDPNILMGMQTSVHIAELVKACYPSPELVSAVGVHVNWLNEVLLRVVQKESQLQGTEAYNECLALLGRIQCVMKMGPFVSVVPQLQYRMYGSLIRQMAQVAQNYDQDFRQLKLFIAQNQILGSYLLQQNRAFADREVQMESFHSAVISQRRQELDDAIAKMDRLSLQMEEEDRAMEQARKEMEEGLKQFQNEQVARAVFAVLKSVAMIALAFVTAGATAPGAAASAAQAVSIAGQAAQGLRRVVEILEQLEAVMEVVAAVKDLVDSLEQVGQIVDAPVMPELPSEADWSIFVNEVEAVAEGMPTEVSEVPVWRAKCKNVAALGREMSITAVQMSELQYDIWVQGLLRDIAQSHADRLAAIQPANLTNYLEMAIQMDMRTTRILIGLLNIMRIQNAALMYEYLLTPTQLTAWPLRMDTVANLLITHESAALSGLAQLGPSSDFTSRHVVKDIPVNLLLDGEDWEFEIPVQAGMSSFPSSWSRVRIRHLEMHFVKEASGIGGEIIHQPTTQTGTVYILLQGSTIFHDRRRDQVLPFQAAAPLNYHYAYRLDTGDSTLTNEPSEQFANKFMQMTPFTRWRLRLSASAKENAGLAFPTATALDSTTQIVITFHVTAIRQIDWRHDEE

SEQ ID NO: 539 - protein, 852 aa, synthetic construct
  REGION 1..852: note = Synthetic
MDYSTLYRDLNQISMPLDRVEFSEVMVIHRMYLRLSDLNVGELPGAERVKRLYVLADVVELATFAHPQLLNTRMPGSVTVIILCRLLQFPTDGSFAAWLELPFMELHTLIEQYRSEIKAADDAKWGTYVHAEEVQLSPLFNGWPYLVVEAQRCIITAAMHNTFNRPGWVRSITQFTTDQSGRVDTTLLARTEFGHIDLPLETDSPTAFSVSHRQSTNLPVEYTGIPVEVVTDPNILMGMQTSVHIAELVKACYPSPELVSAVGVHVNWLNEVLLRVVQKESQLQGTEAYNECLALLGRIQCVMKMGPFVSVVPQLQYRMYGSLIRQMAQVAQNYDQDFRQLKLFIAQNQILGSYLLQQNKAFADREVQMESFHSAVISQRRQELDDAIAKMDRLSLQMEEEDRAMEQARKEMEEGLKQFQNEQVARAVFAVLKSVAMIALAFVTAGATAPGAAASAAQAVNIAGQAAQGLRRVVEILEQLEAVMEVVAAVKDLVDSLEQVGQIVDAPVMPELPSEADWSIFVNEIEAVAEGMPTEVSEVPVWRAKCKNVAALGREMCITAEQISQLQYDIWVQGLLRDIAQSHADRLAAIQPANLTNYLEMAIQMDMRTTRILIGLLNIMRIQNAALMYEYLLTPTQLTAWPLRMDTVANLLITHESAALSGLAQLGPPSDFTSRHVVKGIPVSLLLDGGDWEFEIPVQGGMSSFPSSWTRVRIRHLEMHFVQEASGGGEIIHQPATQTGTIYILLQGSTVFHDRRREEVMTFQAAVPLNYHYAYRLDTGDSTLTNEPSEQFANKFMQMTPFTHWRLRLSASAAENKGLAFPTATAPDSTTEIAITFHVTAIRQIDWRQEEE

SEQ ID NO: 540 - protein, 852 aa, synthetic construct
  REGION 1..852: note = Synthetic
MDYSTLYRDLNQISMPLDRVEFSEVMVIHRMYLRLSDLNVGQLEGAEKVKRLYVLADVVELATFAHPQLLNTRMPGSVTVIILCRLLQWPTDGSFAAWLELPFMELHTLIEQYRSEIKAADDAKWGTYVHAEEVQLSPLFNGWPYLVVEAQRCIITAAMHNTFNRPGWVRSITQFTTDQSGRVDTTLLARTEFGHIDLPLETDSPTAFSVSHRQSTNLPVEYTGIPVEVVTDPNILMGMQTSVHIAELVKACYPSPELVSAVGVHVNWLNEVLLRVVQKESQLQGTEAYNECLALLGRIQCVMKMVRIGLVVPQLQYRMYGSLINQMAQVAQNYDREFKQFKLFIIQNQILGSYLLQQNRAFADREVQMESFHSAVISQRRQELDDAIAKMDRLSLQMEEEDRAMEQARKEMEEGLKQFQNEQVARAVFAVLKSVAMIALAFVTAGATAPGAAASAAQAVNIAGQAAQALRRVVEILEGLEAVMEVVAAIKHLVDALDQVSQIVDAPPMPDMPSEAGWSIFVNEVEAVAEGMPTEVSEVPVWRAKCKNVAALGREMSITAVQMSELQYDIWVQGMMRDMARSQADRLAAIQPADLTNYLEMATQMDMRTTRMLLGLLNILRIQNAALMYEYLLTPTQLTAWPLRMDTVANLLITHESAALSGLAQLGPPSDFTSRHVVKGIPVSLLLDGGDWEFEIPVQGGMSSFPSSWTRVRIRHLEMHFVQEASGGGEIIHQPATQTGTIYILLQGSTVFHDRRREEVMTFQAAVPLNYHYAYRLDTGEATLTNEPSEQFANTFMQMTPFTHWRLRLSASAAENKGLAFPTATAPDSTTEIAITFHVTAIRQIDWRQEEE

SEQ ID NO: 541 - protein, 853 aa, synthetic construct
  REGION 1..853: note = Synthetic
MDYSTLYRDLNQISMPLDRVEFSEVMVIHRMYLRLSDLNVGELPGAERVKRLYVLADVVELATFAHPQLLNTRMPGSVTVIILCRLLQFPTDGSFAAWLELPFMELHTLIEQYRSEIKAADDAKWGTYVHAEEVQLSPLFNGWPYLVVEAQRCIITAAMHNTFNRPGWVRSITQFTTDQSGRVDTTLLARTEFGHIDLPLETDSPTAFSVSHRQSTNLPVEYTGIPVEVVTDPNILMGMQTSVHIAELVKACYPSPELVSAVGVHVNWLNEVLLRVVQKESQLQGTEAYNECLALLGRIQCVMKMGPFVSVVPQLQYRMYGSLIRQMAQVAQNYDQDFRQLKLFIAQNQILGSYLLQQNKAFADREVQMESFHSAVISQRREELDNTFAKMDRLSGQMEAESSAMEQAKKEMDEGLRQFQNRQVANALFAVLSAVAQIGLAFLTAGATAPGAVASAGQAVSIAGQAAQGLRRVVEILEQLEAVMEVVAAVKDLVDSLEQVGQIVDAPVMPELPSEADWSIFVNEVEAVAEGMPTEVSEVPVWRAKCKNVAALGREMSITAVQMSELQYDIWVQGLLRDIAQSHADRLAAIQPANLTNYLEMAIQMDMRTTRMLLGLLNILRIQNAALRYEYLLMPTELTTWPLGMDTVGDLLIAQENAALIGLMQLGPSSDFTSRHVVKDIPVNLLLDGEDWEFEIPVQAGMSSFPSSWSRVRIRHLEMHFVKEASGIGGEIIHRPATQTGTIYILLQGSTVFHDRRREEVMTFQAAVPLNYHYAYRLDTGEATLTNEPSEQFANTFMQMTPFTHWRLRLSASAAENKGLAFPTATAPDSTTEIAITFHVTAIRQIDWRQEEE

SEQ ID NO: 542 - protein, 865 aa, synthetic construct
  REGION 1..865: note = Synthetic
MDYSTLYRDLNQISMPLDRVEFSEVMVIHRMYLRLSDLNVGELPGAERVKRLYVLADVVELATFAHPQLLNTRMPGSVTVIILCRLLQWPTDGRQSDTELHLTFMKLHAIQREENRWEITAADGMNWGVYIHAEEVQVGVLTMSWSSVLRVSALRSVITSGFRAVSVFEVPGSVRSTLGATLRPDHALYSTTMQATPNASHISAFNLRIVSPSAYRVCPLQNDTDTYLGIPADVAAVLPVDVVTDPNILLGMQTTVHIAELVKACHPSPDVVSAVGEHLNWLNKLLLPLKESTQLQGSESYKECLALLGRVHAAMKMVRIGLVVPQLQYRMYGSLINQMAQVAQNYDREFKQFKLFIIQNQILGSYLLQQNRAFAERELQMESFHAAVISQRREELDNTFAKMDRLSLQMEEEDRAMEQARKEMEEGLKQFQNEQVARAVFAVLKSVAMIALAFVTAGATAPGAAASAAQAVNIAGQAAQALRRVVEILEGLEAVMEVVAAIKHLVDALDQVSQIVDAPPMPDMPSEADWSIFVNEIEAVAEGMPTEVSEVPAWKAKCKNVAALGREMSITAVQMSELQYDIWVQGMMRDMARSQADRLAAIQPADLTNYLEMATQMDMRTTRMLLGLLNILRIQNAALRYEYLLMPTELTTWPLGMDTVGDLLIAQENAALIGLMQLGPSSDFTSRHVVKDIPVNLLLDGEDWEFEIPVQAGMSSFPSSWSRVRIRHLEMHFVKEASGIGGEIIHQPTTQTGTVYILLQGSTIFHDRRRDQVLPFQAAAPLNYHYAYRLDTGDSTLTNEPSEQFANKFMQMTPFTRWRLRLSASAKENAGLAFPTATALDSTTQIVITFHVTAIRQIDWRHDEE

SEQ ID NO: 543 - protein, 866 aa, synthetic construct
  REGION 1..866: note = Synthetic
MALVDYGKLFEDLNQISMGVLDRVEFSEVMVIHRMYVRLADLNVGQLEGAEKVKRLYVFADVVELPVVEWRWPPQIPGSVTVIILCRLLQWPTDGRQSDTELHLTFMKLHAIQREENRWEITAADGMNWGVYIHAEEVQVGVLTMSWSSVLRVSALRSVITSGFRAVSVFEVPGSVRSTLGATLRPDHALYSTTMQATPNASHISAFNLRIVSPSAYRVCPLQNDTDTYLGIPADVAAVLPVDVVTDPNILLGMQTTVHIAELVKACHPSPDVVSAVGEHLNWLNKLLLPLKESTQLQGSESYKECLALLGRVHAAMKMVRIGLVVPQLQYRMYGSLIRQMAQVAQNYDQDFRQLKLFIAQNQILGSYLLQQNKAFADREVQMESFHSAVISQRREELDDAIAKMDRLSLQMEEEDRAMEQARKEMEEGLKQFQNEQVARAVFAVLKSVAMIALAFVTAGATAPGAAASAAQAVNIAGQAAQALRRVVEILEGLEAVMEVVAAIKHLVDALDQVSQIVDAPPMPDMPSEADWSIFVNEIEAVAEGMPTEVSEVPAWKAKCKNVAALGREMSITAVQMSELQYDIWVQGMMRDMARSQADRLAAIQPADLTNYLEMAIQMDMRTTRMLLGLLNILRIQNAALRYEYLLMPTELTTWPLGMDTVGDLLIAQENAALIGLMQLGPPSDFTSRHVVKGIPVSLLLDGGDWEFEIPVQGGMSSFPSSWTRVRIRHLEMHFVQEASGGGEIIHQPTTQTGTVYILLQGSTIFHDRRRDQVLPFQAAAPLNYHYAYRLDTGDSTLTNEPSEQFANKFMQMTPFTRWRLRLSASAAENKGLAFPTATAPDSTTEIAITFHVTAIRQIDWRQEEE

SEQ ID NO: 544 - protein, 851 aa, synthetic construct; identical to SEQ ID NO: 522
  REGION 1..851: note = Synthetic

SEQ ID NO: 545 - protein, 853 aa, synthetic construct; identical to SEQ ID NO: 532
  REGION 1..853: note = Synthetic

SEQ ID NO: 546 - protein, 852 aa, synthetic construct
  REGION 1..852: note = Synthetic
MDYSTLYRDLNQISMPLDRVEFSEVMVIHRMYLRLSDLNVGELPGAERVKRLYVLADVVELATFAHPQLLNTRMPGSVTVIILCRLLQFPTDGSFAAWLELPFMELHTLIEQYRSEIKAADDAKWGTYVHAEEVQLSPLFNGWPYLVVEAQRCIITAAMHNTFNRPGWVRSITQFTTDQSGRVDTTLLARTEFGHIDLPLETDSPTAFSVSHRQSTNLPVEYTGIPVEVVTDPNILMGMQTSVHIAELVKACYPSPELVSAVGVHVNWLNEVLLRVVQKESQLQGTEAYNECLALLGRIQCVMKMGPFVSVVPQLQYRMYGSLIRQMAQVAQNYDQDFRQLKLFIAQNQILGSYLLQQNKAFADREVQMESFHSAVISQRRQELDDAIAKMDRLSLQMEEEDRAMEQARKEMEEGLKQFQNEQVARAVFAVLKSVAMIALAFVTAGATAPGAVASAGQAVSIAGQAAQGLRRVVEILEQLEAVMEVVAAVKDLVDSLEQVGQIVDAPVMPELPSEADWSIFVNEVEAVAEGMPTEVSEVPVWRAKCKNVAALGREMCITAEQISQLQYDIWVQGLLRDIAQSHADRLAAIQPANLTNYLEMAIQMDMRTTRILIGLLNIMRIQNAALMYEYLLTPTQLTAWPLRMDTVANLLITHESAALSGLAQLGPPSDFTSRHVVKGIPVSLLLDGGDWEFEIPVQGGMSSFPSSWTRVRIRHLEMHFVQEASGGGEIIHQPATQTGTVYILLQGSTIFHDRRRDQVLPFQAAAPLNYHYAYRLDTGDSTLTNEPSEQFANKFMQMTPFTRWRLRLSASAKENAGLAFPTATALDSTTQIVITFHVTAIRQIDWRHDEE

SEQ ID NO: 547 - protein, 852 aa, synthetic construct
  REGION 1..852: note = Synthetic
MDYSTLYRDLNQISMPLDRVEFSEVMVIHRMYVRLADLNVGQLPGAERVKRLYVLADVVELATFAHPQLLNTRMPGSVTVIILCRLLQFPTDGSFAAWLELPFMELHTLIEQYRSEIKAADDAKWGTYVHAEEVQLSPLFNGWPYLVVEAQRCIITAAMHNTFNRPGWVRSITQFTTDQSGRVDTTLLARTEFGHIDLPLETDSPTAFSVSHRQSTNLPVEYTGIPVEVVTDPNILMGMQTSVHIAELVKACHPSPDVVSAVGVHVNWLNEVLLRVVQKESQLQGTEAYNECLALLGRIQCVMKMGPFVSVVPQLQYRMYGSLINQMAQVAQNYDREFKQFKLFIIQNQILGSYLLQQNRAFAERELQMESFHAAVISQRREELDNTFAKMDRLSGQMEAESSAMEQAKKEMDEGLRQFQNRQVANALFAVLSAVAQIGLAFLTAGATAPGAAASAAQAVNIAGQAAQGLRRVVEILEQLEAVMEVVAAVKDLVDSLEQVGQIVDAPVMPELPSEADWSIFVNEVEAVAEGMPTEVSEVPVWKAKCKNVAALGREMSITAVQMSELQYDIWVQGMMRDIAQSHADRLAAIQPANLTNYLEMAIQMDMRTTRILIGLLNILRIQNAALRYEYLLMPTELTTWPLGMDTVANLLITHESAALSGLAQLGPPSDFTSRHVVKGIPVSLLLDGGDWEFEIPVQGGMSSFPSSWTRVRIRHLEMHFVQEASGGGEIIHQPATQTGTIYILLQGSTVFHDRRREEVMTFQAAVPLNYHYAYRLDTGDSTLTNEPSEQFANKFMQMTPFTRWRLRLSASAAENKGLAFPTATAPDSTTEIAITFHVTAIRQIDWRHDEE

SEQ ID NO: 548 - protein, 852 aa, synthetic construct
  REGION 1..852: note = Synthetic
MDYSTLYRDLNQISMPLDRVEFSEVMVIHRMYLRLSDLNVGELPGAERVKRLYVFVDVVELATFAHPQLLNTRMPGSVTVIILCRLLQFPTDGSFAAWLELPFMELHTLIEQYRSEIKAADDAKWGTYVHAEEVQLSPLFNGWPYLVVEAQRCIITAAMHNTFNRPGWVRSITQFTTDQSGRVDTTLLARTEFGHIDLPLETDSPTAFSVSHRQSTNLPVEYTGIPVEVVTDPNILMGMQTSVHIAELVKACYPSPELVSAVGVHVNWLNEVLLRVVQKESQLQGTEAYNECLALLGRIQCVMKMGPFVSVVPQLQYRMYGSLINQMAQVAQNYDQDFRQLKLFIAQNQILGSYLLQQNKAFADREVQMESFHSAVISQRRQELDDAIAKMDRLSLQMEAESSAMEQAKKEMDEGLRQFQNRQVANALFAVLSAVAQIGLAFLTAGATAPGAVASAGQAVSIAGQAAQGLRRVVEILEQLEAVMEVVAAVKDLVDSLEQVGQIVDAPVMPELPSEADWSIFVNEVEAVAEGMPTEVSEVPVWRAKCKNVAALGREMSITAVQMSELQYDIWVQGMMRDMARSQADRLAAIQPADLTNYLEMATQMDMRTTRILIGLLNIMRIQNAALMYEYLLTPTQLTAWPLRMDTVANLLITHESAALSGLAQLGPPSDFTSRHVVKDIPVNLLLDGEDWEFEIPVQAGMSSFPSSWSRVRIRHLEMHFVKEASGGGEIIHQPATQTGTIYILLQGSTVFHDRRREEVMTFQAAVPLNYHYAYRLDTGEATLTNEPSEQFANTFMQMTPFTHWRLRLSASAAENKGLAFPTATALDSTTQIVITFHVTAIRQIDWRHEEE

SEQ ID NO: 549 - protein, 855 aa, synthetic construct
  REGION 1..855: note = Synthetic
MALVDYGKLFEDLNQISMPLDRVEFSEVMVIHRMYLRLSDLNVGELPGAERVKRLYVFADVVELATFAHPQLLNTRMPGSVTVIILCRLLQFPTDGSFAAWLELPFMELHTLIEQYRSEIKAADDAKWGTYVHAEEVQLSPLFNGWPYLVVEAQRCIITAAMHNTFNRPGWVRSITQFTTDQSGRVDTTLLARTEFGHIDLPLETDSPTAFSVSHRQSTNLPVEYTGIPVEVVTDPNILMGMQTSVHIAELVKACYPSPELVSAVGVHVNWLNEVLLRVVQKESQLQGTEAYNECLALLGRIQCVMKMGPFVSVVPQLQYRMYGSLINQMAQVAQNYDREFKQFKLFIIQNQILGSYLLQQNRAFAERELQMESFHAAVISQRREELDNTFAKMDRLSGQMEAESSAMEQAKKEMDEGLRQFQNRQVANALFAVLSAVAQIGLAFLTAGATAPGAAASAAQAVNIAGQAAQALRRVVEILEGLEAVMEVVAAIKHLVDALDQVSQIVDAPPMPDMPSEADWSIFVNEIEAVAEGMPTEVSEVPAWKAKCKNVAALGREMCITAEQISQLQYDIWVQGLLRDIAQSHADRLAAIQPANLTNYLEMAIQMDMRTTRILIGLLNIMRIQNAALMYEYLLTPTQLTAWPLRMDTVANLLITHESAALSGLAQLGPPSDFTSRHVVKGIPVSLLLDGGDWEFEIPVQGGMSSFPSSWTRVRIRHLEMHFVQEASGGGEIIHQPATQTGTIYILLQGSTVFHDRRREEVMTFQAAVPLNYHYAYRLDTGEATLTNEPSEQFANKFMQMTPFTRWRLRLSASAKENAGLAFPTATALDSTTQIVITFHVTAIRQIDWRHDEE

SEQ ID NO: 550 - protein, 852 aa, synthetic construct
  REGION 1..852: note = Synthetic
MDYSTLYRDLNQISMPLDRVEFSEVMVIHRMYLRLSDLNVGELPGAERVKRLYVLADVVELATFAHPQLLNTRMPGSVTVIILCRLLQFPTDGSFAAWLELPFMELHTLIEQYRSEIKAADDAKWGTYVHAEEVQLSPLFNGWPYLVVEAQRCIITAAMHNTFNRPGWVRSITQFTTDQSGRVDTTLLARTEFGHIDLPLETDSPTAFSVSHRQSTNLPVEYTGIPVEVVTDPNILMGMQTSVHIAELVKACHPSPELVSAVGVHVNWLNEVLLRVVQKESQLQGTEAYNECLALLGRIQCVMKMGPFVSVVPQLQYRMYGSLIRQMAQVAQNYDQDFRQLKLFIAQNQILGSYLLQQNKAFADREVQMESFHAAVISQRREELDDAIAKMDRLSLQMEEEDRAMEQARKEMEEGLKQFQNEQVARAVFAVLSAVAQIGLAFLTAGATAPGAAASAAQAVNIAGQAAQALRRVVEILEGLEAVMEVVAAIKHLVDALDQVSQIVDAPPMPDMPSEADWSIFVNEIEAVAEGMPTEVSEVPAWKAKCKNVAALGREMCITAEQISQLQYDIWVQGLLRDIAQSHADRLAAIQPANLTNYLEMAIQMDMRTTRILIGLLNIMRIQNAALMYEYLLTPTQLTAWPLRMDTVANLLITHESAALSGLAQLGPPSDFTSRHVVKGIPVSLLLDGGDWEFEIPVQGGMSSFPSSWTRVRIRHLEMHFVQEASGGGEIIHQPATQTGTIYILLQGSTVFHDRRREEVMTFQAAVPLNYHYAYRLDTGEATLTNEPSEQFANTFMQMTPFTHWRLRLSASAKENAGLAFPTATALDSTTQIVITFHVTAIRQIDWRHDEE

SEQ ID NO: 551 - protein, 852 aa, synthetic construct
  REGION 1..852: note = Synthetic
MDYSTLYRDLNQISMPLDRVEFSEVMVIHRMYLRLSDLNVGELPGAERVKRLYVLADVVELAAFAHPQLLNTRMPGSVTVIILCRLLQFPTDGSFAAWLELPFMELHTLIEQYRSEIKAADDAKWGTYVHAEEVQLSPLFNGWPYLVVEAQRCIITAAMHNTFNRPGWVRSITQFTTDQSGRVDTTLLARTEFGHIDLPLETDSPTAFSVSHRQSTNLPVEYTGIPVEVVTDPNILMGMQTSVHIAELVKACYPSPELVSAVGVHVNWLNEVLLRVVQKESQLQGTEAYNECLALLGRIQCVMKMGPFVSVVPQLQYRMYGSLIRQMAQVAQNYDQDFRQLKLFIAQNQILGSYLLQQNKAFADREVQMESFHSAVISQRRQELDNTFAKMDRLSGQMEAESSAMEQAKKEMDEGLRQFQNRQVANALFAVLSAVAQIGLAFLTAGATAPGAVASAGQAVSIAGQAAQGLRRVVEILEQLEAVMEVVAAVKDLVDSLEQVGQIVDAPVMPELPSEADWSIFVNEVEAVAEGMPTEVSEVPVWRAKCKNVAALGREMSITAVQMSELQYDIWVQGLLRDIAQSHADRLAAIQPANLTNYLEMAIQMDMRTTRMLLGLLNIMRIQNAALMYEYLLMPTELTTWPLGMDTVGDLLIAQENAALIGLMQLGPSSDFTSRHVVKDIPVNLLLDGEDWEFEIPVQGGMSSFPSSWTRVRIRHLEMHFVQEASGGGEIIHQPTTQTGTVYILLQGSTVFHDRRREEVMTFQAAVPLNYHYAYRLDTGEATLTNEPSEQFANTFMQMTPFTHWRLRLSASAAENKGLAFPTATALDSTTQIVITFHVTAIRQIDWRQEEE

SEQ ID NO: 552 - protein, 853 aa, synthetic construct
  REGION 1..853: note = Synthetic
MDYSTLYRDLNQISMPLDRVEFSEVMVIHRMYLRLSDLNVGELPGAERVKRLYVLADVVELATFAHPQLLNTRMPGSVTVIILCRLLQFPTDGSFAAWLELPFMELHTLIEQYRSEIKAADDAKWGTYVHAEEVQLSPLFNGWPYLVVEAQRCIITAAMHNTFNRPGWVRSITQFTTDQSGRVDTTLLARTEFGHIDLPLETDSPTAFSVSHRQSTNLPVEYTGIPVEVVTDPNILMGMQTSVHIAELVKACYPSPDVVSAVGEHLNWLNEVLLRVVQKESTQLQGSESYKECLALLGRVHAAMKMVRIGLVVPQLQYRMYGSLINQMAQVAQNYDREFKQFKLFIIQNQILGSYLLQQNRAFAERELQMESFHAAVISQRRQELDDAIAKMDRLSGQMEAESSAMEQAKKEMDEGLRQFQNRQVANALFAVLSAVAQIGLAFLTAGATAPGAVASAGQAVSIAGQAAQGLRRVVEILEQLEAVMEVVAAVKDLVDSLEQVGQIVDAPVMPELPSEADWSIFVNEVEAVAEGMPTEVSEVPAWKAKCKNVAALGREMCITAEQISQLQYDIWVQGLLRDIAQSHADRLAAIQPANLTNYLEMAIQMDMRTTRILIGLLNIMRIQNAALMYEYLLTPTELTTWPLGMDTVGDLLIAQENAALIGLMQLGPSSDFTSRHVVKGIPVSLLLDGGDWEFEIPVQGGMSSFPSSWTRVRIRHLEMHFVQEASGGGEIIHQPATQTGTIYILLQGSTVFHDRRREEVMTFQAAVPLNYHYAYRLDTGEATLTNEPSEQFANTFMQMTPFTHWRLRLSASAKENAGLAFPTATALDSTTQIVITFHVTAIRQIDWRQEEE

SEQ ID NO: 553 - protein, 854 aa, synthetic construct
  REGION 1..854: note = Synthetic
MDYSTLYRDLNQISMGVLDRVEFSEVMVIHRMYLRLSDLNVGELPGAERVKRLYVLADVVELATFAHPQLLNTRMPGSVTVIILCRLLQFPTDGSFAAWLELPFMKLHTLIEQYRSEIKAADDAKWGTYVHAEEVQLSPLFNGWPYLVVEAQRCIITAAMHNTFNRPGWVRSITQFTTDQSGRVDTTLLARTEFGHIDLPLETDSPTAFSVSHRQSTNLPVEYTGIPVEVVTDPNILMGMQTSVHIAELVKACYPSPELVSAVGVHVNWLNEVLLRVVQKESQLQGTEAYNECLALLGRIQCVMKMGPFVSVVPQLQYRMYGSLIRQMAQVAQNYDQDFRQLKLFIAQNQILGSYLLQQNKAFADREVQMESFHSAVISQRRQELDDAIAKMDRLSLQMEEEDRAMEQARKEMEEGLKQFQNEQVARAVFAVLKSVAMIALAFVTAGATAPGAVASAGQAVSIAGQAAQGLRRVVEILEGLEAVMEVVAAIKHLVDALDQVSQIVDAPPMPDMPSEADWSIFVNEIEAVAEGMPTEVSEVPVWRAKCKNVAALGREMSITAVQMSELQYDIWVQGMMRDMARSQADRLAAIQPADLTNYLEMATQMDMRTTRMLLGLLNILRIQNAALRYEYLLMPTELTTWPLRMDTVANLLITHESAALSGLAQLGPSSDFTSRHVVKDIPVNLLLDGEDWEFEIPVQAGMSSFPSSWSRVRIRHLEMHFVKEASGIGGEIIHQPTTQTGTVYILLQGSTVFHDRRREEVMTFQAAVPLNYHYAYRLDTGEATLTNEPSEQFANTFMQMTPFTRWRLRLSASAKENAGLAFPTATALDSTTQIVITFHVTAIRQIDWRHDEE

SEQ ID NO: 554 - protein, 852 aa, synthetic construct
  REGION 1..852: note = Synthetic
MDYSTLYRDLNQISMPLDRVEFSEVMVIHRMYLRLSDLNVGELPGAERVKRLYVLADVVELATFAHPQLLNTRMPGSVTVIILCRLLQFPTDGSFAAWLELPFMELHTLIEQYRSEIKAADDAKWGTYVHAEEVQLSPLFNGWPYLVVEAQRCIITAAMHNTFNRPGWVRSITQFTTDQSGRVDTTLLARTEFGHIDLPLETDSPTAFSVSHRQSTNLPVEYTGIPVEVVTDPNILLGMQTTVHIAELVKACHPSPDVVSAVGVHLNWLNKLLLPLKESTQLQGSEAYNECLALLGRIQCVMKMGPFVSVVPQLQYRMYGSLIRQMAQVAQNYDQDFRQLKLFIAQNQILGSYLLQQNKAFADREVQMESFHSAVISQRRQELDDAIAKMDRLSLQMEEEDRAMEQARKEMEEGLKQFQNEQVARAVFAVLKSVAMIALAFVTAGATAPGAAASAAQAVSIAGQAAQGLRRVVEILEQLEAVMEVVAAVKDLVDSLEQVGQIVDAPVMPELPSEADWSIFVNEVEAVAEGMPTEVSEVPAWKAKCKNVAALGREMCITAEQISQLQYDIWVQGLLRDIAQSHADRLAAIQPANLTNYLEMAIQMDMRTTRILIGLLNIMRIQNAALMYEYLLTPTQLTTWPLGMDTVGDLLIVQENAALIGLMQLGPPSDFTSRHVVKGIPVSLLLDGGDWEFEIPVQGGMSSFPSSWTRVRIRHLEMHFVQEASGIGGEIIHQPTTQTGTVYILLQGSTVFHDRRRDQVLPFQAAAPLNYHYAYRLDTGDSTLTNEPSEQFANKFMQMTPFTRWRLRLSASAKENAGLAFPTATALDSTTQIVITFHVTAIRQIDWRHDEE

SEQ ID NO: 555 - protein, 852 aa, synthetic construct
  REGION 1..852: note = Synthetic
MDYSTLYRDLNQISMPLDRVEFSEVMVIHRMYLRLSDLNVGELPGAERVKRLYVLADVVELATFAHPQLLNTRMPGSVTVIILCRLLQFPTDGSFAAWLELPFMELHTLIEQYRSEIKAADDAKWGTYVHAEEVQLSPLFNGWPYLVVEAQRCIITAAMHNTFNRPGWVRSITQFTTDQSGRVDTTLLARTEFGHIDLPLETDSPTAFSVSHRQSTNLPVEYTGIPVEVVTDPNILMGMQTSVHIAELVKACYPSPELVSAVGVHVNWLNEVLLRVVQKESQLQGTEAYNECLALLGRIQCVMKMGPFVSVVPQLQYRMYGSLINQMAQVAQNYDREFKQFKLFIIQNQILGSYLLQQNRAFADREVQMESFHSAVISQRREELDDAIAKMDRLSLQMEAESSAMEQAKKEMEEGLKQFQNEQVARAVFAVLKSVAMIALAFVTAGATAPGAAASAAQAVSIAGQAAQALRRVVEILEGLEAVMEVVAAVKDLVDALDQVSQIVDAPPMPDMPSEADWSIFVNEIEAVAEGMPTEVSEVPAWKAKCKNVAALGREMCITAEQISQLQYDIWVQGLLRDIARSQADRLAAIQPADLTNYLEMATQMDMRTTRMLLGLLNILRIQNAALRYEYLLMPTELTTWPLGMDTVGDLLIAQENAALIGLMQLGPSSDFTSRHVVKDIPVNLLLDGEDWEFEIPVQAGMSSFPSSWSRVRIRHLEMHFVQEASGGGEIIHQPATQTGTIYILLQGSTVFHDRRREEVMTFQAAVPLNYHYAYRLDTGEATLTNEPSEQFANTFMQMTPFTHWRLRLSASAAENKGLAFPTATAPDSTTEIAITFHVTAIRQIDWRQEEE

SEQ ID NO: 556 - protein, 853 aa, synthetic construct
  REGION 1..853: note = Synthetic
MDYSTLYRDLNQISMPLDRVEFSEVMVIHRMYLRLSDLNVGELPGAERVKRLYVLADVVELATFAHPQLLNTRMPGSVTVIILCRLLQFPTDGSFAAWLELPFMELHTLIEQYRSEIKAADDAKWGTYVHAEEVQLSPLFNGWPYLVVEAQRCIITAAMHNTFNRPGWVRSITQFTTDQSGRVDTTLLARTEFGHIDLPLETDSPTAFSVSHRQSTNLPVEYTGIPVEVVTDPNILMGMQTSVHIAELVKACYPSPELVSAVGVHVNWLNEVLLRVVQKESQLQGTEAYNECLALLGRIQCVMKMGPFVSVVPQLQYRMYGSLIRQMAQVAQNYDQDFRQLKLFIAQNQILGSYLLQQNKAFADREVQMESFHSAVISQRRQELDDAIAKMDRLSLQMEEEDRAMEQARKEMEEGLKQFQNEQVARAVFAVLKSVAMIALAFVTAGATAPGAAASAAQAVNIAGQAAQALRRVVEILEGLEAVMEVVAAVKDLVDSLEQVGQIVDAPVMPELPSEADWSIFVNEIEAVAEGMPTEVSEVPAWKAKCKNVAALGREMCITAEQISQLQYDIWVQGLLRDIAQSHADRLAAIQPADLTNYLEMATQMDMRTTRILIGLLNIMRIQNAALMYEYLLTPTQLTAWPLRMDTVANLLITHESAALSGLAQLGPPSDFTSRHVVKGIPVSLLLDGGDWEFEIPVQGGMSSFPSSWSRVRIRHLEMHFVKEASGIGGEIIHQPTTQTGTVYILLQGSTIFHDRRRDQVLPFQAAAPLNYHYAYRLDTGEATLTNEPSEQFANTFMQMTPFTHWRLRLSASAAENKGLAFPTATAPDSTTEIAITFHVTAIRQIDWRQEEE

SEQ ID NO: 557 - protein, 853 aa, synthetic construct; identical to SEQ ID NO: 552
  REGION 1..853: note = Synthetic

SEQ ID NO: 558 - protein, 852 aa, synthetic construct
  REGION 1..852: note = Synthetic
MDYSTLYRDLNQISMPLDRVEFSEVMVIHRMYLRLSDLNVGELPGAERVKRLYVLADVVELATFAHPQLLNTRMPGSVTVIILCRLLQFPTDGSFAAWLELPFMELHTLIEQYRSEIKAADDAKWGTYVHAEEVQLSPLFNGWPYLVVEAQRCIITAAMHNTFNRPGWVRSITQFTTDQSGRVDTTLLARTEFGHIDLPLETDSPTAFSVSHRQSTNLPVEYTGIPVEVVTDPNILMGMQTSVHIAELVKACYPSPELVSAVGVHVNWLNEVLLRVVQKESQLQGTEAYNECLALLGRIQCVMKMGPFVSVVPQLQYRMYGSLIRQMAQVAQNYDQDFRQLKLFIAQNQILGSYLLQQNRAFADREVQMESFHSAVISQRRQELDNTFAKMDRLSGQMEAESSAMEQAKKEMDEGLRQFQNRQVANALFAVLSAVAQIGLAFLTAGATAPGAVASAGQAVSIAGQAAQGLRRVVEILEGLEAVMEVVAAVKDLVDSLEQVGQIVDAPVMPELPSEADWSIFVNEVEAVAEGMPTEVSEVPAWKAKCKNVAALGREMCITAEQISQLQYDIWVQGLLRDIAQSHADRLAAIQPANLTNYLEMAIQMDMRTTRILIGLLNIMRIQNAALMYEYLLTPTQLTAWPLRMDTVGDLLITQENAALIGLMQLGPPSDFTSRHVVKGIPVSLLLDGGDWEFEIPVQGGMSSFPSSWTRVRIRHLEMHFVQEASGGGEIIHQPATQTGTIYILLQGSTVFHDRRREEVMTFQAAVPLNYHYAYRLDTGDSTLTNEPSEQFANKFMQMTPFTRWRLRLSASAKENAGLAFPTATALDSTTQIVITFHVTAIRQVDWRHDEE

SEQ ID NO: 559 - protein, 852 aa, synthetic construct
  REGION 1..852: note = Synthetic
MDYSTLYRDLNQISMPLDRVEFSEVMVIHRMYLRLSDLNVGQLEGAERVKRLYVFADVVELATFAHPQLLNTRMPGSVTVIILCRLLQFPTDGSFAAWLELPFMELHTLIEQYRSEIKAADDAKWGTYVHAEEVQLSPLFNGWPYLVVEAQRCIITAAMHNTFNRPGWVRSITQFTTDQSGRVDTTLLARTEFGHIDLPLETDSPTAFSVSHRQSTNLPVEYTGIPVEVVTDPNILMGMQTSVHIAELVKACYPSPELVSAVGVHVNWLNEVLLRVVQKESQLQGTEAYNECLALLGRIQCVMKMGPFVSVVPQLQYRMYGSLIRQMAQVAQNYDQDFRQLKLFIAQNQILGSYLLQQNKAFADREVQMESFHSAVISQRREELDNTFAKMDRLSLQMEAESSAMEQAKKEMDEGLRQFQNRQVANALFAVLKSVAMIALAFVTAGATAPGAVASAGQAVSIAGQAAQGLRRVVEILEQLEAVMEVVAAVKDLVDSLEQVGQIVDAPVMPELPSEADWSIFVNEVEAVAEGMPTEVSEVPVWRAKCKNVAALGREMSITAVQISQLQYDICVQGMMRDMARSQADRLAAIQPADLTNYLEMATQMDMRTTRILIGLLNIMRIQNAALMYEYLLTPTQLTAWPLRMDTVANLLITHESAALSGLAQLGPPSDFTSRHVVKGIPVSLLLDGGDWEFEIPVQGGMSSFPSSWTRVRIRHLEMHFVQEASGGGEIIHQPATQTGTVYILLQGSTVFHDRRREEVMTFQAAVPLNYHYAYRLDTGDSTLTNEPSEQFANKFMQMTPFTRWRLRLSASAKENAGLAFPTATALDSTTQIVITFHVTAIRQIDWRHDEE

SEQ ID NO: 560 - protein, 853 aa, synthetic construct
  REGION 1..853: note = Synthetic
MDYSTLYRDLNQISMPLDRVEFSEVMVIHRMYLRLSDLNVGELPGAERVKRLYVLADVVELATFAHPQLLNTRMPGSVTVIILCRLLQFPTDGSFAAWLELPFMELHTLIEQYRSEIKAADDAKWGTYVHAEEVQLSPLFNGWPYLVVEAQRCIITAAMHNTFNRPGWVRSITQFTTDQSGRVDTTLLARTEFGHIDLPLETDSPTAFSVSHRQSTNLPVEYTGIPVEVVTDPNILMGMQTSVHIAELVKACYPSPELVSAVGVHVNWLNEVLLRVVQKESQLQGTEAYNECLALLGRIQCVMKMGPFVSVVPQLQYRMYGSLIRQMAQVAQNYDQDFRQLKLFIAQNQILGSYLLQQNKAFADREVQMESFHSAVISQRRQELDDAIAKMDRLSLQMEEEDRAMEQAKKEMDEGLKQFQNEQVARAVFAVLKSVAMIALAFVTAGATAPGAVASAGQAVSIAGQAAQGLRRVVEILEGLEAVMEVVAAIKHLVDALDQVSQIVDAPPMPDMPSEADWSIFVNEVEAVAEGMPTEVSEVPVWRAKCKNVAALGREMSITAVQMSELQYDIWVQGMMRDMARSQTDRLAAIQPADLTNYLEMATQMDMRTTRMLLGLLNILRIQNAALRYEYLLMPTELTTWPLGMDTVGDLLIAQENAALIGLMQLGPSSDFTSRHVVKDIPVNLLLDGEDWEFEIPVQAGMSSFPSSWSRVRIRHLEMHFVKEASGIGGEIIHQPTTQTGTVYILLQGSTIFHDRRRDQVLPFQAAAPLNYHYAYRLDTGDSTLTNEPSEQFANKFMQMTPFTRWRLRLSASAKENAGLAFPTATALDSTTQIVITFHVTAIRQIDWRHDEE

SEQ ID NO: 561 - protein, 853 aa, synthetic construct
  REGION 1..853: note = Synthetic
MDYSTLYRDLNQISMPLDRVEFSEVMVIHRMYLRLSDLNVGELPGAERVKRLYVLADVVELATFAHPQLLNTRMPGSVTVIILCRLLQFPTDGSFAAWLELPFMELHTLIEQYRSEIKAADDAKWGTYVHAEEVQLSPLFNGWPYLVVEAQRCIITAAMHNTFNRPGWVRSITQFTTDQSGRVDTTLLARTEFGHIDLPLETDSPTAFSVSHRQSTNLPVEYTGIPVEVVTDPNILMGMQTSVHIAELVKACYPSPELVSAVGVHVNWLNEVLLRVVQKESQLQGTEAYNECLALLGRIQCVMKMGPFVSVVPQLQYRMYGSLIRQMAQVAQNYDQEFKQFKLFIIQNQILGSYLLQQNRAFAERELQMESFHAAVISQRREELDNTFAKMDRLSGQMEAESSAMEQAKKEMDEGLRQFQNRQVANALFAVLSAVAQIGLAFVTAGATAPGAVASAGQAVSIAGQAAQGLRRVVEILEQLEAVMEVVAAIKHLVDALDQVSQIVDAPPMPDMPSEADWSIFVNEIEAVAEGMPTEVSEVPVWKAKCKNVAALGREMCITAVQMSELQYDIWVQGLLRDIAQSHADRLAAIQPANLTNYLEMAIQMDMRTTRILIGLLNIMRIQNAALMYEYLLTPTQLTAWPLRMDTVANLLITHESAALSGLAQLGPSSDFTSRHVVKDIPVNLLLDGEDWEFEIPVQAGMSSFPSSWSRVRIRHLEMHFVKEASGIGGEIIHQPTTQTGTVYILLQGSTIFHDRRRDQVLPFQAAAPLNYHYAYRLDTGEATLTNEPSEQFANTFMQMTPFTHWRLRLSASAAENKGLAFPTATALDSTTQIVITFHVTAIRQIDWRQEEE

SEQ ID NO: 562 - protein, 852 aa, synthetic construct
  REGION 1..852: note = Synthetic
MDYSTLYRDLNQISMPLDRVEFSEVMVIHRMYLRLSDLNVGQLEGAEKVKRLYVLADVVELATFAHPQLLNTRMPGSVTVIILCRLLQFPTDGSFAAWLELPFMELHTLIEQYRSEIKAADDAKWGTYVHAEEVQLSPLFNGWPYLVVEAQRCIITAAMHNTFNRPGWVRSITQFTTDQSGRVDTTLLARTEFGHIDLPLETDSPTAFSVSHRQSTNLPVEYTGIPVEVVTDPNILMGMQTSVHIAELVKACYPSPELVSAVGVHVNWLNEVLLRVVQKESQLQGTEAYNECLALLGRIQCVMKMGPFVSVVPQLQYRMYGSLIRQMAQVAQNYDQDFRQLKLFIAQNQILGSYLLQQNKAFADREVQMESFHSAVISQRREELDDAIAKMDRLSLQMEEEDRAMEQARKEMEEGLKQFQNEQVARAVFAVLKSVAMIALAFVTAGATAPGAAASAAQAVNIAGQAAQALRRVVEILEQLEAVMEVVAAVKDLVDSLEQVGQIVDAPVMPELPSEADWSIFVNEVEAVAEGMPTEVSEVPAWKAKCKNVAALGREMSITAEQISQLQYDIWVQGLLRDMARSQADRLAAIQPADLTNYLEMATQMDMRTTRMLLGLLNILRIQNAALRYEYLLMPTELTTWPLGMDTVGDLLIAQENAALIGLMQLGPSSDFTSRHVVKDIPVSLLLDGGDWEFEIPVQGGMSSFPSSWTRVRIRHLEMHFVQEASGGGEIIHQPATQTGTIYILLQGSTVFHDRRREEVMTFQAAVPLNYHYAYRLDTGEATLTNEPSEQFANKFMQMTPFTRWRLRLSASAAENKGLAFPTATAPDSTTEIAITFHVTAIRQIDWRQEEE

SEQ ID NO: 563 - protein, 867 aa, synthetic construct
  REGION 1..867: note = Synthetic
MALVDYGKLFEDLNQISMGVLDRVEFSEVMVIHRMYVRLADLNVGQLEGAEKVKRLYVFADVVELPVVEWRWPPQIPGSVTVIILCRLLQWPTDGRQSDTELHLTFMKLHAIQREENRWEITAADGMNWGVYIHAEEVQVGVLTMSWSSVLRVSALRSVITSGFRAVSVFEVPGSVRSTLGATLRPDHALYSTTMQATPNASHISAFNLRIVSPSAYRVCPLQNDTDTYLGIPADVAAVLPVDVVTDPNILLGMQTTVHIAELVKACHPSPDVVSAVGEHLNWLNKLLLPLKESTQLQGSESYKECLALLGRVHAAMKMVRIGLVVPQLQYRMYGSLINQMAQVAQNYDREFKQFKLFIIQNQILGSYLLQQNRAFAERELQMESFHAAVISQRRQELDDAIAKMDRLSGQMEAESSAMEQAKKEMDEGLRQFQNRQVANALFAVLSAVAQIGLAFLTAGATAPGAVASAGQAVSIAGQAAQGLRRVVEILEGLEAVMEVVAAVKDLVDSLEQVGQIVDAPVMPELPSEADWSIFVNEVEAVAEGMPTEVSEVPVWRAKCKNVAALGREMSITAVQISQLQYDIWVQGMMRDMARSQADRLAAIQPADLTNYLEMATQMDMRTTRMLLGLLNILRIQNAALRYEYLLMPTELTTWPLGMDTVGDLLIAQENAALIGLMQLGPSSDFTSRHVVKGIPVSLLLDGGDWEFEIPVQAGMSSFPSSWSRVRIRHLEMHFVQEASGIGGEIIHQPATQTGTVYILLQGSTIFHDRRRDQVLPFQAAAPLNYHYAYRLDTGDSTLTNEPSEQFANKFMQMTPFTRWRLRLSASAKENAGLAFPTATALDSTTQIVITFHVTAIRQIDWRHDEE

SEQ ID NO: 564 - protein, 867 aa, synthetic construct
  REGION 1..867: note = Synthetic
MALVDYGKLFEDLNQISMGVLDRVEFSEVMVIHRMYVRLADLNVGQLEGAEKVKRLYVFADVVELPVVEWRWPPQIPGSVTVIILCRLLQWPTDGRQSDTELHLTFMKLHAIQREENRWEITAADGMNWGVYIHAEEVQVGVLTMSWSSVLRVSALRSVITSGFRAVSVFEVPGSVRSTLGATLRPDHALYSTTMQATPNASHISAFNLRIVSPSAYRVCPLQNDTDTYLGIPADVAAVLPVDVVTDPNILLGMQTTVHIAELVKACHPSPDVVSAVGEHLNWLNKLLLPLKESTQLQGSESYKECLALLGRVHAAMKMVRIGLVVPQLQYRMYGSLINQMAQVAQNYDREFKQFKLFIIQNQILGSYLLQQNRAFAERELQMESFHAAVISQRREELDNTFAKMDRLSLQMEEEDRAMEQAKKEMDEGLRQFQNRQVANALFAVLSAVAQIGLAFLTAGATAPGAVASAGQAVSIAGQAAQGLRRVVEILEGLEAVMEVVAAIKHLVDSLEQVGQIVDAPVMPELPSEADWSIFVNEVEAVAEGMPTEVSEVPVWKAKCKNVAALGREMSITAVQMSELQYDIWVQGMMRDMARSQADRLAAIQPADLTNYLEMATQMDMRTTRMLLGLLNILRIQNAALRYEYLLMPTELTTWPLGMDTVGDLLIAQENAALIGLMQLGPSSDFTSRHVVKDIPVNLLLDGEDWEFEIPVQGGMSSFPSSWTRVRIRHLEMHFVKEASGIGGEIIHQPATQTGTVYILLQGSTIFHDRRREEVLPFQAAAPLNYHYAYRLDTGEATLTNEPSEQFANTFMQMTPFTRWRLRLSASAAENKGLAFPTATAPDSTTEIAITFHVTAIRQIDWRQEEE

SEQ ID NO: 565 - protein, 866 aa, synthetic construct
  REGION 1..866: note = Synthetic
MALVDYGKLFEDLNQISMGVLDRVEFSEVMVIHRMYVRLADLNVGQLEGAEKVKRLYVFADVVELPVVEWRWPPQIPGSVTVIILCRLLQWPTDGRQSDTELHLTFMKLHAIQREENRWEITAADGMNWGVYIHAEEVQVGVLTMSWSSVLRVSALRSVITSGFRAVSVFEVPGSVRSTLGATLRPDHALYSTTMQATPNASHISAFNLRIVSPSAYRVCPLQNDTDTYLGIPADVAAVLPVDVVTDPNILLGMQTTVHIAELVKACHPSPDVVSAVGEHLNWLNKLLLPLKESTQLQGSESYKECLALLGRVHAAMKMVRIGLVVPQLQYRMYGSLINQMAQVAQNYDREFKQFKLFIIQNQILGSYLLQQNRAFAERELQMESFHSAVISQRREELDNTFAKMDRLSLQMEEEDRAMEQAKKEMDEGLRQFQNRQVANALFAVLSAVAQIGLAFLTAGATAPGAVASAGQAVSIAGQAAQGLRRVVEILEQLEAVMEVVAAVKDLVDSLEQVGQIVDAPVMPELPSEADWSIFVNEVEAVAEGMPTEVSEVPAWKAKCKNVAALGREMCITAEQISQLQYDIWVQGMMRDMARSQADRLAAIQPADLTNYLEMATQMDMRTTRMLLGLLNILRIQNAALRYEYLLMPTELTTWPLGMDTVGDLLIAHESAALSGLAQLGPPSDFTSRHVVKGIPVSLLLDGGDWEFEIPVQGGMSSFPSSWTRVRIRHLEMHFVQEASGGGEIIHQPATQTGTIYILLQGSTVFHDRRREEVMTFQAAVPLNYHYAYRLDTGEATLTNEPSEQFANTFMQMTPFTHWRLRLSASAAENKGLAFPTATAPDSTTEIAITFHVTAIRQIDWRHDEE

SEQ ID NO: 566 - protein, 867 aa, synthetic construct
  REGION 1..867: note = Synthetic
MALVDYGKLFEDLNQISMGVLDRVEFSEVMVIHRMYVRLADLNVGQLEGAEKVKRLYVFADVVELPVVEWRWPPQIPGSVTVIILCRLLQWPTDGRQSDTELHLTFMKLHAIQREENRWEITAADGMNWGVYIHAEEVQVGVLTMSWSSVLRVSALRSVITSGFRAVSVFEVPGSVRSTLGATLRPDHALYSTTMQATPNASHISAFNLRIVSPSAYRVCPLQNDTDTYLGIPADVAAVLPVDVVTDPNILLGMQTTVHIAELVKACHPSPDVVSAVGEHLNWLNKLLLPLKESTQLQGSESYKECLALLGRVHAAMKMVRIGLVVPQLQYRMYGSLINQMAQVAQNYDREFKQFKLFIIQNQILGSYLLQQNRAFAERELQMESFHSAVISQRRQELDDAIAKMDRLSGQMEAESSAMEQAKKEMDEGLRQFQNRQVANALFAVLSAVAMIALAFVTAGATAPGAVASAGQAVSIAGQAAQGLRRVVEILEGLEAVMEVVAAVKDLVDSLEQVGQIVDAPVMPELPSEADWSIFVNEVEAVAEGMPTEVSEVPVWKAKCKNVAALGREMSITAVQMSELQYDIWVQGMMRDMARSHADRLAAIQPANLTNYLEMAIQMDMRTTRMLLGLLNILRIQNAALRYEYLLTPTELTTWPLGMDTVGDLLIAQENAALIGLMQLGPPSDFTSRHVVKGIPVSLLLDGGDWEFEIPVQGGMSSFPSSWSRVRIRHLEMHFVKEASGIGGEIIHQPTTQTGTVYILLQGSTVFHDRRREEVMTFQAAVPLNYHYAYRLDTGDSTLTNEPSEQFANKFMQMTPFTRWRLRLSASAKENAGLAFPTATAPDSTTEIVITFHVTAIRQIDWRHDEE

SEQ ID NO: 567 - protein, 866 aa, synthetic construct
  REGION 1..866: note = Synthetic
MALVDYGKLFEDLNQISMGVLDRVEFSEVMVIHRMYVRLADLNVGQLEGAEKVKRLYVFADVVELPVVEWRWPPQIPGSVTVIILCRLLQWPTDGRQSDTELHLTFMKLHAIQREENRWEITAADGMNWGVYIHAEEVQVGVLTMSWSSVLRVSALRSVITSGFRAVSVFEVPGSVRSTLGATLRPDHALYSTTMQATPNASHISAFNLRIVSPSAYRVCPLQNDTDTYLGIPADVAAVLPVDVVTDPNILLGMQTTVHIAELVKACHPSPDVVSAVGEHLNWLNKLLLPLKESTQLQGSESYKECLALLGRVHAAMKMVRIGLVVPQLQYRMYGSLINQMAQVAQNYDREFKQFKLFIIQNQILGSYLLQQNRAFAERELQMESFHAAVISQRRQELDDAIAKMDRLSLQMEAEDRAMEQAKKEMDEGLKQFQNRQVANALFAVLSAVAQIGLAFVTAGATAPGAVASAGQAVSIAGQAAQGLRRVVEILEQLEAVMEVVAAVKDLVDSLEQVGQIVDAPVMPELPSEADWSIFVNEVEAVAEGMPTEVSEVPVWRAKCKNVAALGREMSITAVQMSELQYDIWVQGLLRDIAQSHADRLAAIQPADLTNYLEMATQMDMRTTRMLLGLLNILRIQNAALRYEYLLMPTELTTWPLGMDTVGDLLIAQENAALIGLMQLGPSSDFTSRHVVKDIPVNLLLDGEDWEFEIPVQGGMSSFPSSWSRVRIRHLEMHFVQEASGGGEIIHQPATQTGTIHILLQGSTVFHDRRRDQVLPFQAAAPLNYHYAYRLDTGEATLTNEPSEQFANKFMQMTPFTRWRLRLSASAKENAGLAFPTATAPDSTTEIAITFHVTAIRQIDWRQEEE

SEQ ID NO: 568 - protein, 866 aa, synthetic construct
  REGION 1..866: note = Synthetic
MALVDYGKLFEDLNQISMGVLDRVEFSEVMVIHRMYVRLADLNVGQLEGAEKVKRLYVFADVVELPVVEWRWPPQIPGSVTVIILCRLLQWPTDGRQSDTELHLTFMKLHAIQREENRWEITAADGMNWGVYIHAEEVQVGVLTMSWSSVLRVSALRSVITSGFRAVSVFEVPGSVRSTLGATLRPDHALYSTTMQATPNASHISAFNLRIVSPSAYRVCPLQNDTDTYLGIPADVAAVLPVDVVTDPNILLGMQTTVHIAELVKACHPSPDVVSAVGEHLNWLNKLLLPLKESTQLQGSESYKECLALLGRVHAAMKMVRIGLVVPQLQYRMYGSLINQMAQVAQNYDREFKQFKLFIIQNQILGSYLLQQNRAFADREVQMESFHAAVISQRREELDNTFAKMDRLSGQMEAESSAMEQAKKEMDEGLRQFQNRQVANALFAVLSAVAQIGLAFLTAGATAPGAVASAGQAVSIAGQAAQGLRRVVEILEQLEAVMEVVAAVKDLVDSLEQVSQIVDAPPMPDMPSEADWSIFVNEVEAVAEGMPTEVSEVPVWRAKCKNVAALGREMSITAEQISQLQYDIWVQGMMRDMARSQADRLAAIQPADLTNYLEMATQMDMRTTRMLLGLLNILRIQNAALMYEYLLTPTQLTAWPLRMDTVANLLITHESAALSGLAQLGPPSDFTSRHVVKDIPVNLLLDGEDWEFEIPVQAGMSSFPSSWTRVRIRHLEMHFVQEASGGGEIIHQPTTQTGTVYILLQGSTIFHDRRREEVMTFQAAVPLNYHYAYRLDTGEATLTNEPSEQFANTFMQMTPFTHWRLRLSASAAENKGLAFPTATAPDSTTEIAITFHVTAIRQIDWRQEEE

SEQ ID NO: 569 - protein, 866 aa, synthetic construct
  REGION 1..866: note = Synthetic
MALVDYGKLFEDLNQISMGVLDRVEFSEVMVIHRMYVRLADLNVGQLEGAEKVKRLYVFADVVELPVVEWRWPPQIPGSVTVIILCRLLQWPTDGRQSDTELHLTFMKLHAIQREENRWEITAADGMNWGVYIHAEEVQVGVLTMSWSSVLRVSALRSVITSGFRAVSVFEVPGSVRSTLGATLRPDHALYSTTMQATPNASHISAFNLRIVSPSAYRVCPLQNDTDTYLGIPADVAAVLPVDVVTDPNILLGMQTTVHIAELVKACHPSPDVVSAVGEHLNWLNKLLLPLKESTQLQGSESYKECLALLGRVHAAMKMVRIGLVVPQLQYRMYGSLINQMAQVAQNYDREFKQFKLFIIQNQILGSYLLQQNKAFADREVQMESFHSAVISQRRQELDDAIAKMDRLSGQMEAESSAMEQAKKEMDEGLRQFQNRQVANALFAVLSAVAQIGLAFVTAGATAPGAVASAGQAVSIAGQAAQGLRRVVEILEGLEAVMEVVAAVKDLVDSLEQVGQIVDAPVMPELPSEADWSIFVNEVEAVAEGMPTEVSEVPVWRAKCKNVAALGREMCITAVQMSELQYDIWVQGLLRDMARSQADRLAAIQPADLTNYLEMATQMDMRTTRMLLGLLNILRIQNAALRYEYLLMPTELTTWPLGMDTVGDLLIAQENAALIGLMQLGPSSDFTSRHVVKGIPVSLLLDGGDWEFEIPVQAGMSSFPSSWTRVRIRHLEMHFVKEASGGGEIIHQPATQTGTIYILLQGSTIFHDRRRDQVLPFQAAAPLNYHYAYRLDTGEATLTNEPSEQFANTFMQMTPFTRWRLRLSASAAENKGLAFPTATAPDSTTEIAITFHVTAIRQIDWRHDEE

SEQ ID NO: 570 - protein, 867 aa, synthetic construct
  REGION 1..867: note = Synthetic
MALVDYGKLFEDLNQISMGVLDRVEFSEVMVIHRMYVRLADLNVGQLEGAEKVKRLYVFADVVELPVVEWRWPPQIPGSVTVIILCRLLQWPTDGRQSDTELHLTFMKLHAIQREENRWEITAADGMNWGVYIHAEEVQVGVLTMSWSSVLRVSALRSVITSGFRAVSVFEVPGSVRSTLGATLRPDHALYSTTMQATPNASHISAFNLRIVSPSAYRVCPLQNDTDTYLGIPADVAAVLPVDVVTDPNILLGMQTTVHIAELVKACHPSPDVVSAVGEHLNWLNKLLLPLKESTQLQGSESYKECLALLGRVHAAMKMVRIGLVVPQLQYRMYGSLINQMAQVAQNYDREFKQFKLFIIQNQILGSYLLQQNRAFAERELQMESFHSAVISQRREELDNTFAKMDRLSGQMEAESSAMEQAKKEMDEGLRQFQNRQVANALFAVLSAVAQIGLAFLTAGATAPGAAASAAQAVNIAGQAAQALRRVVEILEGLEAVMEVVAAIKHLVDALDQVSQIVDAPVMPELPSEADWSIFVNEVEAVAEGMPTEVSEVPAWKAKCKNVAALGREMSITAVQMSELQYDIWVQGLLRDMARSQADRLAAIQPADLTNYLEMATQMDMRTTRMLLGLLNILRIQNAALRYEYLLMPTELTTWPLGMDTVGDLLITHESAALSGLAQLGPPSDFTSRHVVKGIPVSLLLDGEDWEFEIPVQAGMSSFPSSWSRVRIRHLEMHFVKEASGIGGEIIHQPTTQTGTVYILLQGSTVFHDRRREEVMTFQAAAPLNYHYAYRLDTGEATLTNEPSEQFANTFMQMTPFTRWRLRLSASAKENAGLAFPTATAPDSTTEIAITFHVTAIRQIDWRHDEE

SEQ ID NO: 571 - protein, 866 aa, synthetic construct
  REGION 1..866: note = Synthetic
MALVDYGKLFEDLNQISMGVLDRVEFSEVMVIHRMYVRLADLNVGQLEGAEKVKRLYVFADVVELPVVEWRWPPQIPGSVTVIILCRLLQWPTDGRQSDTELHLTFMKLHAIQREENRWEITAADGMNWGVYIHAEEVQVGVLTMSWSSVLRVSALRSVITSGFRAVSVFEVPGSVRSTLGATLRPDHALYSTTMQATPNASHISAFNLRIVSPSAYRVCPLQNDTDTYLGIPADVAAVLPVDVVTDPNILLGMQTTVHIAELVKACHPSPDVVSAVGEHLNWLNKLLLPLKESTQLQGSESYKECLALLGRVHAAMKMVRIGLVVPQLQYRMYGSLINQMAQVAQNYDREFKQFKLFIIQNQILGSYLLQQNRAFAERELQMESFHAAVISQRREELDDAIAKMDRLSLQMEEEDRAMEQAKKEMDEGLRQFQNRQVANALFAVLSAVAQIGLAFVTAGATAPGAVASAGQAVSIAGQAAQGLRRVVEILEGLEAVMEVVAAVKDLVDSLEQVGQIVDAPVMPDMPSEADWSIFVNEVEAVAEGMPTEVSEVPVWRAKCKNVAALGREMCITAVQMSELQYDIWVQGMMRDMARSQADRLAAIQPADLTNYLEMATQMDMRTTRMLLGLLNIMRIQNAALMYEYLLTPTQLTAWPLRMDTVANLLITQENAALIGLMQLGPSSDFTSRHVVKDIPVNLLLDGEDWEFEIPVQGGMSSFPSSWSRVRIRHLEMHFVQEASGGGEIIHQPTTQTGTVYILLQGSTIFHDRRRDQVLPFQAAAPLNYHYAYRLDTGDSTLTNEPSEQFANKFMQMTPFTRWRLRLSASAAENKGLAFPTATAPDSTTEIAITFHVTAIRQIDWRQEEE

SEQ ID NO: 572 - protein, 866 aa, synthetic construct
  REGION 1..866: note = Synthetic
MALVDYGKLFEDLNQISMGVLDRVEFSEVMVIHRMYVRLADLNVGQLEGAEKVKRLYVFADVVELPVVEWRWPPQIPGSVTVIILCRLLQWPTDGRQSDTELHLTFMKLHAIQREENRWEITAADGMNWGVYIHAEEVQVGVLTMSWSSVLRVSALRSVITSGFRAVSVFEVPGSVRSTLGATLRPDHALYSTTMQATPNASHISAFNLRIVSPSAYRVCPLQNDTDTYLGIPADVAAVLPVDVVTDPNILLGMQTTVHIAELVKACHPSPDVVSAVGEHLNWLNKLLLPLKESTQLQGSESYKECLALLGRVHAAMKMVRIGLVVPQLQYRMYGSLINQMAQVAQNYDREFKQFKLFIIQNQILGSYLLQQNRAFAERELQMESFHAAVISQRRQELDDAIAKMDRLSLQMEEEDRAMEQAKKEMDEGLRQFQNRQVANALFAVLSAVAQIGLASLTAGATAPGAVASAGQAVSIAGQAAQGLRRVVEILEGLEAVMEVVAAVKDLVDSLEQVGQIVDAPVMPELPSEADWSIFVNEVEAVAEGMPTEVSEVPVWRAKCKNVAALGREMCITAEQMSELQYDIWVQGMMRDMARSQADRLAAIQPADLTNYLEMAIQMDMRTTRMLLGLLNILRIQNAALRYEYLLMPTELTTWPLGMDTVGDLLIAQENAALIGLMQLGPSSDFTSRHVVKDIPVNLLLDGEDWEFEIPVQAGMSSFPSSWSRVRIRHLEMHFVQEASGGGEIIHQPATQTGTVYILLQGSTIFHDRRREEVMTFQAAVPLNYHYAYRLDTGDSTLTNEPSEQFANKFMQMTPFTRWRLRLSASAKENAGLAFPTATAPDSTTEIAITFHVTAIRQIDWRHDEE

SEQ ID NO: 573 - protein, 866 aa, synthetic construct
  REGION 1..866: note = Synthetic
MALVDYGKLFEDLNQISMGVLDRVEFSEVMVIHRMYVRLADLNVGQLEGAEKVKRLYVFADVVELPVVEWRWPPQIPGSVTVIILCRLLQWPTDGRQSDTELHLTFMKLHAIQREENRWEITAADGMNWGVYIHAEEVQVGVLTMSWSSVLRVSALRSVITSGFRAVSVFEVPGSVRSTLGATLRPDHALYSTTMQATPNASHISAFNLRIVSPSAYRVCPLQNDTDTYLGIPADVAAVLPVDVVTDPNILLGMQTTVHIAELVKACHPSPDVVSAVGEHLNWLNKLLLPLKESTQLQGSESYKECLALLGRVHAAMKMVRIGLVVPQLQYRMYGSLINQMAQVAQNYDREFKQFKLFIIQNQILGSYLLQQNRAFAERELQMESFHAAVISQRRQELDDAIAKMDRLSLQMEEEDRAMEQARKEMEEGLRQFQNEQVARAVFAVLKSVAMIALAFVTAGATAPGAVASAGQAVSIAGQAAQGLRRVVEILEGLEAVMEVVAAVKDLVDSLEQVGQIVDAPVMPELPSEADWSIFVNEVEAVAEGMPTEVSEVPAWRAKCKNVAALGREMCITAVQMSELQYDIWVQGMMRDMARSQADRLAAIQPADLTNYLEMAIQMDMRTTRMLLGLLNILRIQNAALRYEYLLMPTELTTWPLGMDTVGDLLIAHESAALSGLAQLGPPSDFTSRHVVKGIPVSLLLDGGDWEFEIPVQGGMSSFPSSWTRVRIRHLEMHFVQEASGGGEIIHQPATQTGTIYILLQGSTVFHDRRRDQVLPFQAAAPLNYHYAYRLDTGDSTLTNEPSEQFANKFMQMTPFTHWRLRLSASAKENAGLAFPTATALDSTTQIVITFHVTAIRQIDWRQEEE

SEQ ID NO: 574 - protein, 867 aa, synthetic construct
  REGION 1..867: note = Synthetic
MALVDYGKLFEDLNQISMGVLDRVEFSEVMVIHRMYVRLADLNVGQLEGAEKVKRLYVFADVVELPVVEWRWPPQIPGSVTVIILCRLLQWPTDGRQSDTELHLTFMKLHAIQREENRWEITAADGMNWGVYIHAEEVQVGVLTMSWSSVLRVSALRSVITSGFRAVSVFEVPGSVRSTLGATLRPDHALYSTTMQATPNASHISAFNLRIVSPSAYRVCPLQNDTDTYLGIPADVAAVLPVDVVTDPNILLGMQTTVHIAELVKACHPSPDVVSAVGEHLNWLNKLLLPLKESTQLQGSESYKECLALLGRVHAAMKMVRIGLVVPQLQYRMYGSLINQMAQVAQNYDREFKQFKLFIIQNQILGSYLLQQNRAFAERELQMESFHAAVISQRRQELDNTFAKMDRLSGQMEEEDRAMEQARKEMEEGLRQFQNRQVANALFAVLSAVAQIGLAFLTAGATAPGAVASAGQAVSIAGQAAQGLRRVVEILEGLEAVMEVVAAVKDLVDSLEQVGQIVDAPVMPELPSEADWSIFVNEIEAVAEGMPTEVSEVPAWKAKCKNVAALGREMSITAVQMSELQYDIWVQGMMRDMARSQADRLAAIQPADLTNYLEMATQMDMRTTRMLLGLLNIMRIQNAALMYEYLLTPTQLTAWPLGMDTVGDLLITHESAALSGLAQLGPPSDFTSRHVVKGIPVSLLLDGGDWEFEIPVQGGMSSFPSSWSRVRIRHLEMHFVKEASGIGGEIIHQPATQTGTIYILLQGSTVFHDRRRDQVLPFQAAAPLNYHYAYRLDTGEATLTNEPSEQFANKFMQMTPFTRWRLRLSASAKENAGLAFPTATALDSTTQIVITFHVTAIRQIDWRQEEE

SEQ ID NO: 575 - protein, 866 aa, synthetic construct
  REGION 1..866: note = Synthetic
MALVDYGKLFEDLNQISMGVLDRVEFSEVMVIHRMYVRLADLNVGQLEGAEKVKRLYVFADVVELPVVEWRWPPQIPGSVTVIILCRLLQWPTDGRQSDTELHLTFMKLHAIQREENRWEITAADGMNWGVYIHAEEVQVGVLTMSWSSVLRVSALRSVITSGFRAVSVFEVPGSVRSTLGATLRPDHALYSTTMQATPNASHISAFNLRIVSPSAYRVCPLQNDTDTYLGIPADVAAVLPVDVVTDPNILLGMQTTVHIAELVKACHPSPDVVSAVGEHLNWLNKLLLPLKESTQLQGSESYKECLALLGRVHAAMKMVRIGLVVPQLQYRMYGSLINQMAQVAQNYDREFKQFKLFIIQNQILGSYLLQQNRAFAERELQMESFHSAVISQRRQELDDAIAKMDRLSGQMEAESSAMEQAKKEMDEGLRQFQNRQVANALFAVLSAVAQIGLALLTAGATAPGAVASAGQAVSIAGQAAQGLRRVVETLEQLEAVMEVVAAVKDLVDSLEQVGQIVDAPPMPDMPSEADWSIFVNEIEAVAEGMPTEVSEVPAWKAKCKNVAALGREMSITAVQMSELQYDIWVQGMMRDMARSQADRLAAIQPADLTNYLEMATQMDMRTTRMLLGLLNILRIQNAALRYEYLLMPTELTTWPLGMDTVGDLLIAQENAALIGLMQLGPSSDFTSRHVVKGIPVSLLLDGGDWEFEIPVQGGMSSFPSSWSRVRIRHLEMHFVQEASGGGEIIHQPTTQTGTVYILLQGSTIFHDRRREEVMTFQAAVPLNYHYAYRLDTGEATLTNEPSEQFANKFMQMTPFTRWRLRLSASAKENAGLAFPTATALDSTTQIVITFHVTAIRQIDWRHDEE

SEQ ID NO: 576 - protein, 867 aa, synthetic construct
  REGION 1..867: note = Synthetic
MALVDYGKLFEDLNQISMGVLDRVEFSEVMVIHRMYVRLADLNVGQLEGAEKVKRLYVFADVVELPVVEWRWPPQIPGSVTVIILCRLLQWPTDGRQSDTELHLTFMKLHAIQREENRWEITAADGMNWGVYIHAEEVQVGVLTMSWSSVLRVSALRSVITSGFRAVSVFEVPGSVRSTLGATLRPDHALYSTTMQATPNASHISAFNLRIVSPSAYRVCPLQNDTDTYLGIPADVAAVLPVDVVTDPNILLGMQTTVHIAELVKACHPSPDVVSAVGEHLNWLNKLLLPLKESTQLQGSESYKECLALLGRVHAAMKMVRIGLVVPQLQYRMYGSLINQMAQVAQNYDREFKQFKLFIIQNQILGSYLLQQNRAFAERELQMESFHSAVISQRRQELDDAIAKMDRLSLQMEEEDRAMEQARKEMEEGLRQFQNRQVANALFAVLKSVAMIALAFVTAGATAPGAVASAGQAVSIAGQAAQGLRRVVEILEQLEAVMEVVAAVKDLVDSLEQVGQIVDAPVMPDMPSEADWSIFVNEVEAVAEGMPTEVSEVPVWRAKCKNVAALGREMSITAVQMSELQYDIWVQGMMRDMARSQADRLAAIQPANLTNYLEMATQMDMRTTRMLLGLLNIMRIQNAALRYEYLLMPTELTTWPLGMDTVGDLLIAQENAALIGLMQLGPSSDFTSRHVVKGIPVSLLLDGGDWEFEIPVQGGMSSFPSSWSRVRIRHLEMHFVQEASGIGGEIIHQPATQTGTIYILLQGSTVFHDRRRDQVLPFQAAAPLNYHYAYRLDTGDSTLTNEPSEQFANKFMQMTPFTRWRLRLSASAKENAGLAFPTATALDSTTEIAITFHVTAIRQIDWRQEEE

SEQ ID NO: 577 - protein, 866 aa, synthetic construct
  REGION 1..866: note = Synthetic
MALVDYGKLFEDLNQISMGVLDRVEFSEVMVIHRMYVRLADLNVGQLEGAEKVKRLYVFADVVELPVVEWRWPPQIPGSVTVIILCRLLQWPTDGRQSDTELHLTFMKLHAIQREENRWEITAADGMNWGVYIHAEEVQVGVLTMSWSSVLRVSALRSVITSGFRAVSVFEVPGSVRSTLGATLRPDHALYSTTMQATPNASHISAFNLRIVSPSAYRVCPLQNDTDTYLGIPADVAAVLPVDVVTDPNILLGMQTTVHIAELVKACHPSPDVVSAVGEHLNWLNKLLLPLKESTQLQGSESYKECLALLGRVHAAMKMVRIGLVVPQLQYRMYGSLINQMAQVAQNYDREFKQFKLFIIQNQILGSYLLQQNRAFAERELQMESFHAAVISQRREELDNTFAKMDRLSGQMEAESSAMEQAKKEMDEGLRQFQNRQVANALFAVLSAVAQIGLAFLTAGATAPGAAASAAQAVNIAGQAAQGLRRVVEILEGLEAVMEVVAAVKDLVDSLEQVGQIVDAPVMPELPSEADWSIFVNEVEAVAEGMPTEVSEVPAWKAKCKNVAALGREMSITAEQISQLQYDIWVQGMMRDMARSQADRLAAIQPADLTNYLEMATQMDMRTTRMLLGLLNILRIQNAALRYEYLLMPTELTTWPLGMDTVGDLLIAQENAALIGLAQLGPPSDFTSRHVVKGIPVSLLLDGGDWEFEIPVQAGMSSFPSSWTRVRIRHLEMHFVQEASGGGEIIHQPATQTGTIYILLQGSTVFHDRRREEVMTFQAAAPLNYHYAYRLDTGDSTLTNEPSEQFANTFMQMTPFTHWRLRLSASAKENAGLAFPTATALDSTTEIAITFHVTAIRQIDWRQEEE

SEQ ID NO: 578 - protein, 867 aa, synthetic construct
  REGION 1..867: note = Synthetic
MALVDYGKLFEDLNQISMGVLDRVEFSEVMVIHRMYVRLADLNVGQLEGAEKVKRLYVFADVVELPVVEWRWPPQIPGSVTVIILCRLLQWPTDGRQSDTELHLTFMKLHAIQREENRWEITAADGMNWGVYIHAEEVQVGVLTMSWSSVLRVSALRSVITSGFRAVSVFEVPGSVRSTLGATLRPDHALYSTTMQATPNASHISAFNLRIVSPSAYRVCPLQNDTDTYLGIPADVAAVLPVDVVTDPNILLGMQTTVHIAELVKACHPSPDVVSAVGEHLNWLNKLLLPLKESTQLQGSESYKECLALLGRVHAAMKMVRIGLVVPQLQYRMYGSLINQMAQVAQNYDREFKQFKLFIIQNQILGSYLLQQNRAFAERELQMESFHSAVISQRREELDNTFAKMDRLSGQMEAESSAMEQAKKEMDEGLRQFQNRQVANALFAVLSAVAQIGLAFLTAGATAPGAVASAGQAVSIAGQAAQGLRRVVEILEQLEAVMEVVAAVKDLVDSLEQVGQIVDAPVMPDMPSEADWSIFVNEVEAVAEGMPTEVSEVPVWRAKCKNVAALGREMSITAVQMSELQYDIWVQGLLRDIAQSHADRLAAIQPANLTNYLEMATQMDMRTTRMLLGLLNILRIQNAALRYEYLLMPTELTTWPLGMDTVANLLITHESAALSGLAQLGPPSDFTSRHVVKGIPVSLLLDGGDWEFEIPVQGGMSSFPSSWTRVRIRHLEMHFVQEASGIGGEIIHQPTTQTGTVYILLQGSTTFHDRRRDQVLPFQAAAPLNYHYAYRLDTGDSTLTNEPSEQFANKFMQMTPFTRWRLRLSASAAENKGLAFPTATAPDSTTEIAITFHVTAIRQIDWRHDEE

SEQ ID NO: 579 - protein, 867 aa, synthetic construct
  REGION 1..867: note = Synthetic
MALVDYGKLFEDLNQISMGVLDRVEFSEVMVIHRMYVRLADLNVGQLEGAEKVKRLYVFADVVELPVVEWRWPPQIPGSVTVIILCRLLQWPTDGRQSDTELHLTFMKLHAIQREENRWEITAADGMNWGVYIHAEEVQVGVLTMSWSSVLRVSALRSVITSGFRAVSVFEVPGSVRSTLGATLRPDHALYSTTMQATPNASHISAFNLRIVSPSAYRVCPLQNDTDTYLGIPADVAAVLPVDVVTDPNILLGMQTTVHIAELVKACHPSPDVVSAVGEHLNWLNKLLLPLKESTQLQGSESYKECLALLGRVHAAMKMVRIGLVVPQLQYRMYGSLINQMAQVAQNYDREFKQFKLFIIQNQILGSYLLQQNRAFAERELQMESFHSAVISQRRQELDDAIAKMDRLSLQMEEEDRAMEQARKEMEEGLKQFQNEQVARAVFAVLKSVAMIALAFVTAGATAPGAVASAGQAVSIAGQAAQGLRRVVEILEGLEAVMEVVAAVKDLVDSLEQVGQIVDAPPMPDMPSEADWSIFVNEVEAVAEGMPTEVSEVPAWKAKCKNVAALGREMCITAEQISQLQYDIWVQGMMRDMARSQADRLAAIQPADLTNYLEMAIQMDMRTTRMLLGLLNILRIQNAALRYEYLLMPTELTTWPLRMDTVANLLITHESAALSGLAQLGPPSDFTSRHVVKDIPVNLLLDGEDWEFEIPVQGGMSSFPSSWSRVRIRHLEMHFVKEASGIGGEIIHQPATQTGTVYILLQGSTVFHDRRREEVMTFQAAVPLNYHYAYRLDTGDSTLTNEPSEQFANKFMQMTPFTRWRLRLSASAKENAGLAFPTATAPDSTTEIAITFHVTAIRQIDWRHDEE

SEQ ID NO: 580 - protein, 866 aa, synthetic construct
  REGION 1..866: note = Synthetic
MALVDYGKLFEDLNQISMGVLDRVEFSEVMVIHRMYVRLADLNVGQLEGAEKVKRLYVFADVVELPVVEWRWPPQIPGSVTVIILCRLLQWPTDGRQSDTELHLTFMKLHAIQREENRWEITAADGMNWGVYIHAEEVQVGVLTMSWSSVLRVSALRSVITSGFRAVSVFEVPGSVRSTLGATLRPDHALYSTTMQATPNASHISAFNLRIVSPSAYRVCPLQNDTDTYLGIPADVAAVLPVDVVTDPNILLGMQTTVHIAELVKACHPSPDVVSAVGEHLNWLNKLLLPLKESTQLQGSESYKECLALLGRVHAAMKMVRIGLVVPQLQYRMYGSLINQMAQVAQNYDREFKQFKLFIIQNQILGSYLLQQNRAFAERELQMESFHAAVISQRREELDDAIAKMDRLSLQMEEEDRAMEQAKKEMDEGLRQFQNRQVANALFAVLSAVAQIGLAFVTAGATAPGAVASAGQAVSIAGQAAQGLRRVVEILEGLEAVMEVVAAVKDLVDSLEQVGQIVDAPVMPELPSEADWSIFVNEVEAVAEGMPTEVSEVPVWRAKCKNVAALGREMCITAEQISQLQYDIWVQGMMRDTAQSHADRLAAIQPADLTNYLEMATQMDMRTTRMLLGLLNILRIQNAALRYEYLLMPTELTTWPLGMDTVGDLLIAHESAALSGLAQLGPPSDFTSRHVVKDIPVSLLLDGEDWEFEIPVQAGMSSFPSSWSRVRIRHLEMHFVKEASGGGEIIHQPTTQTGTVYILLQGSTVFHDRRRDQVLPFQAAAPLNYHYAYRLDTGDSTLTNEPSEQFANKFMQMTPFTRWRLRLSASAKENAGLAFPTATAPDSTTEIAITFHVTAIRQIDWRHDEE

SEQ ID NO: 581 - protein, 866 aa, synthetic construct
  REGION 1..866: note = Synthetic
MALVDYGKLFEDLNQISMGVLDRVEFSEVMVIHRMYVRLADLNVGQLEGAEKVKRLYVFADVVELPVVEWRWPPQIPGSVTVIILCRLLQWPTDGRQSDTELHLTFMKLHAIQREENRWEITAADGMNWGVYIHAEEVQVGVLTMSWSSVLRVSALRSVITSGFRAVSVFEVPGSVRSTLGATLRPDHALYSTTMQATPNASHISAFNLRIVSPSAYRVCPLQNDTDTYLGIPADVAAVLPVDVVTDPNILLGMQTTVHIAELVKACHPSPDVVSAVGEHLNWLNKLLLPLKESTQLQGSESYKECLALLGRVHAAMKMVRIGLVVPQLQYRMYGSLINQMAQVAQNYDREFKQFKLFIIQNQILGSYLLQQNRAFAERELQMESFHSAVISQRRQELDDAIAKMDRLSLQMEEEDRAMEQARKEMEEGLKQFQNEQVARAVFAVLKSVAMIALAFVTAGATAPGAVASAGQAVSIAGQAAQGLRRVVEILEGLEAVMEVVAAVKDLVDSLEQVGQIVDAPVMPELPSEADWSIFVNEIEAVAEGMPTEVSEVPVWRAKCKNVAALGREMCITAEQISQLQYDIWVQGMMRDMARSQADRLAAIQPADLTNYLEMATQMDMRTTRMLLGLLNILRIQNAALRYEYLLMPTELTTWPLGMDTVGDLLIAHESAALSGLAQLGPPSDFTSRHVVKGIPVSLLLDGEDWEFEIPVQGGMSSFPSSWTRVRIRHLEMHFVQEASGGGEIIHQPTTQTGTIYILLQGSTVFHDRRRDQVLPFQAAAPLNYHYAYRLDTGEATLTNEPSEQFANKFMQTTPFTHWRLRLSASAAENKGLAFPTATAPDSTTEIAITFHVTAIRQIDWRQEEE

SEQ ID NO: 582 - protein, 866 aa, synthetic construct
  REGION 1..866: note = Synthetic
MALVDYGKLFEDLNQISMGVLDRVEFSEVMVIHRMYVRLADLNVGQLEGAEKVKRLYVFADVVELPVVEWRWPPQIPGSVTVIILCRLLQWPTDGRQSDTELHLTFMKLHAIQREENRWEITAADGMNWGVYIHAEEVQVGVLTMSWSSVLRVSALRSVITSGFRAVSVFEVPGSVRSTLGATLRPDHALYSTTMQATPNASHISAFNLRIVSPSAYRVCPLQNDTDTYLGIPADVAAVLPVDVVTDPNILLGMQTTVHIAELVKACHPSPDVVSAVGEHLNWLNKLLLPLKESTQLQGSESYKECLALLGRVHAAMKMVRIGLVVPQLQYRMYGSLINQMAQVAQNYDREFKQFKLFIIQNQILGSYLLQQNKAFADREVQMESFHAAVISQRRQELDDAIAKMDRLSLQMEEEDRAMEQARKEMEEGLKQFQNEQVARAVFAVLKSVAMIALAFVTAGATAPGAVASAGQAVSIAGQAAQGLRRVVEILEQLEAVMEVVAAVKDLVDSLEQVGQIVDAPVMPELPSEADWSIFVNEVEAVAEGMPTEVSEVPVWRAKCKNVAALGREMCITAEQISQLQYDIWVQGLLRDIARSQADRLAAIQPADLTNYLEMAIQMDMRTTRILIGLLNIMRIQNAALMYEYLLTPTQLTAWPLRMDTVANLLITHESAALSGLAQLGPPSDFTSRHVVKGIPVSLLLDGGDWEFEIPVQGGMSSFPSSWSRVRIRHLEMHFVQEASGGGEIIHQPATQTGTIYILLQGSTIFHDRRRDQVLPFQAAAPLNYHYAYRLDTGDSTLTNEPSEQFANKFMQMTPFTRWRLRLSASAAENKGLAFPTATAPDSTTEIAITFHVTAIRQIDWRQEEE

SEQ ID NO: 583 - protein, 866 aa, synthetic construct
  REGION 1..866: note = Synthetic
MALVDYGKLFEDLNQISMGVLDRVEFSEVMVIHRMYVRLADLNVGQLEGAEKVKRLYVFADVVELPVVEWRWPPQIPGSVTVIILCRLLQWPTDGRQSDTELHLTFMKLHAIQREENRWEITAADGMNWGVYIHAEEVQVGVLTMSWSSVLRVSALRSVITSGFRAVSVFEVPGSVRSTLGATLRPDHALYSTTMQATPNASHISAFNLRIVSPSAYRVCPLQNDTDTYLGIPADVAAVLPVDVVTDPNILLGMQTTVHIAELVKACHPSPDVVSAVGEHLNWLNKLLLPLKESTQLQGSESYKECLALLGRVHAAMKMVRIGLVVPQLQYRMYGSLINQMAQVAQNYDREFKQFKLFIIQNQILGSYLLQQNRAFAERELQMESFHSAVISQRRQELDDAIAKMDRLSLQMEAESSAMEQAKKEMDEGLRQFQNRQVARAVFAVLKSVAMIALAFVTAGATAPGAVASAGQAVSIAGQAAQALRRVVEILEQLEAVMEVVAAVKDLVDSLEQVGQIVDAPVMPELPSEADWSIFVNEVEAVAEGMPTEVSEVPAWKAKCKNVAALGREMSITAVQMSELQYDIWVQGMMRDMARSQADRLAAIQPADLTNYLEMATQMDMRTTRMLLGLLNILRIQNAALRYEYLLMPTELTTWPLGMDTVGDLLIAQENAALIGLMQLGPSSDFTSRHVVKGIPVSLLLDGGDWEFEIPVQGGMSSFPSSWSRVRIRHLEMHFVQEASGGGEIIHQPATQTGTIYILLQGSTIFHDRRRDQVLPFQAAAPLNYHYAYRLDTGEATLTNEPSEQFANTFMQMTPFTHWRLRLSASAKENAGLAFPTATALDSTTQIVITFHVTAVRQIDWRHDEE

SEQ ID NO: 584 - protein, 867 aa, synthetic construct
  REGION 1..867: note = Synthetic
MALVDYGKLFEDLNQISMGVLDRVEFSEVMVIHRMYVRLADLNVGQLEGAEKVKRLYVFADVVELPVVEWRWPPQIPGSVTVIILCRLLQWPTDGRQSDTELHLTFMKLHAIQREENRWEITAADGMNWGVYIHAEEVQVGVLTMSWSSVLRVSALRSVITSGFRAVSVFEVPGSVRSTLGATLRPDHALYSTTMQATPNASHISAFNLRIVSPSAYRVCPLQNDTDTYLGIPADVAAVLPVDVVTDPNILLGMQTTVHIAELVKACHPSPDVVSAVGEHLNWLNKLLLPLKESTQLQGSESYKECLALLGRVHAAMKMVRIGLVVPQLQYRMYGSLINQMAQVAQNYDREFKQFKLFIIQNQILGSYLLQQNRAFADREVQMESFHSAVISQRREELDNTFAKMDRLSGQMEAESSAMEQAKKEMDEGLRQFQNRQVANALFAVLSAVAQIGLAFLTAGATAPGAVASAGQAVSIAGQAAQGLRRVVEILEQLEAVMEVVAAVKDLVDSLEQVGQIVDAPVMPELPSEADWSIFVNEVEAVAEGMPTEVSEVPVWRAKCKNVAALGREMSITAVQMSELQYVIWVQGMMRDMARSQADRLAAIQPADLTNYLEMATQMDMRTTRMLLGLLNILRIQNAALMYEYLLTPTQLTAWPLRMDTVANLLITHESAALSGLAQLGPPSDFTSRHVVKGIPVSLLLDGGDWEFEIPVQGGMSSFPSSWSRVRIRHLEMHFVKEASGIGGEIIHQPATQTGTIYILLQGSTVFHDRRRDQVLPFQAAAPLNYHYAYRLDTGDSTLTNEPSEQFANTFMQMTPFTHWRLRLSASAAENKGLAFPTATAPDSTTEIAITFHVTAIRQIDWRQEEE

SEQ ID NO: 585 - protein, 866 aa, synthetic construct
  REGION 1..866: note = Synthetic
MALVDYGKLFEDLNQISMGVLDRVEFSEVMVIHRMYVRLADLNVGQLEGAEKVKRLYVFADVVELPVVEWRWPPQIPGSVTVIILCRLLQWPTDGRQSDTELHLTFMKLHAIQREENRWEITAADGMNWGVYIHAEEVQVGVLTMSWSSVLRVSALRSVITSGFRAVSVFEVPGSVRSTLGATLRPDHALYSTTMQATPNASHISAFNLRIVSPSAYRVCPLQNDTDTYLGIPADVAAVLPVDVVTDPNILLGMQTTVHIAELVKACHPSPDVVSAVGEHLNWLNKLLLPLKESTQLQGSESYKECLALLGRVHAAMKMVRIGLVVPQLQYRMYGSLINQMAQVAQNYDREFKQFKLFIIQNQILGSYLLQQNRAFAERELQMESFHAAVISQRRQELDDAIAKMDRLSLQMEEEDRAMEQARKEMEEGLKQFQNEQVARAVFAVLKSVAMIALAFVTAGATAPGAAASAAQAVSIAGQAAQGLRRVVEILEGLEAVMEVVAAVKDLVDSLEQVGQIVDAPVMPELPSEADWSIFVNEVEAVAEGMPTEVSEVPVWRAKCKNVAALGREMCITAVQMSELQYDIWVQGMMRDMARSQADRLAAIQPADLTNYLEMATQMDMRTTRMLLGLLNILRIQNAALRYEYLLMPTELTTWPLGMDTVGDLLIAQENAALIGLMQLGPSSDFTSRHVVKGIPVSLLLDGGDWEFEIPVQGGMSSFPSSWSRVRIRHLEMHFVQEASGGGEIIHQPATQTGTIYILLQGSTVFHDRRREEVMTFQAAVPLNYHYAYRLDTGEATLTNEPSEQFANTFMQMTPFTHWRLRLSASAKENAGLAFPTATAPDSTTEIAITFHVTAIRQIDWRHDEE

SEQ ID NO: 586 - protein, 866 aa, synthetic construct
  REGION 1..866: note = Synthetic
MALVDYGKLFEDLNQISMGVLDRVEFSEVMVIHRMYVRLADLNVGQLEGAEKVKRLYVFADVVELPVVEWRWPPQIPGSVTVIILCRLLQWPTDGRQSDTELHLTFMKLHAIQREENRWEITAADGMNWGVYIHAEEVQVGVLTMSWSSVLRVSALRSVITSGFRAVSVFEVPGSVRSTLGATLRPDHALYSTTMQATPNASHISAFNLRIVSPSAYRVCPLQNDTDTYLGIPADVAAVLPVDVVTDPNILLGMQTTVHIAELVKACHPSPDVVSAVGEHLNWLNKLLLPLKESTQLQGSESYKECLALLGRVHAAMKMVRIGLVVPQLQYRMYGSLINQMAQVAQNYDREFKQFKLFIIQNQILGSYLLQQNRAFAERELQMESFHSAVISQRREELDNTFAKMDRLSGQMEAESSAMEQAKKEMDEGLRQFQNRQVANALFAVLSAVAQIGLAFLTAGATAPGAVASAGQAVSIAGQAAQGLRRVVEILEGLEAVMEVVAAIKHLVDALDQVSQIVDAPPMPDMPSEADWSIFVNEVEAVAEGMPTEVSEVPAWKAKCKNVAALGREMCITAEQISQLQYDIWVQGLLRDIAQSQADRLAAIQPADLTNYLEMATQMDMRTTRMLLGLLNILRIQNAALRYEYLLTPTQLTAWPLRMDTVANLLITHESAALSGLAQLGPPSDFTSRHVVKDIPVNLLLDGEDWEFEIPVQGGMSSFPSSWTRVRIRHLEMHFVQEASGGGEIIHQPATQTGTIYILLQGSTIFHDRRREEVMTFQAAVPLNYHYAYRLDTGDSTLTNEPSEQFANTFMQMTPFTRWRLRLSASAKENAGLAFPTATAPDSTTEIAITFHVTAIRQIDWRQEEE

SEQ ID NO: 587 - protein, 867 aa, synthetic construct
  REGION 1..867: note = Synthetic
MALVDYGKLFEDLNQISMGVLDRVEFSEVMVIHRMYVRLADLNVGQLEGAEKVKRLYVFADVVELPVVEWRWPPQIPGSVTVIILCRLLQWPTDGRQSDTELHLTFMKLHAIQREENRWEITAADGMNWGVYIHAEEVQVGVLTMSWSSVLRVSALRSVITSGFRAVSVFEVPGSVRSTLGATLRPDHALYSTTMQATPNASHISAFNLRIVSPSAYRVCPLQNDTDTYLGIPADVAAVLPVDVVTDPNILLGMQTTVHIAELVKACHPSPDVVSAVGEHLNWLNKLLLPLKESTQLQGSESYKECLALLGRVHAAMKMVRIGLVVPQLQYRMYGSLINQMAQVAQNYDREFKQFKLFIIQNQILGSYLLQQNRAFAERELQMESFHAAVISQRREELDNTFAKMDRLSGQMEEEDRAMEQAKKEMDEGLRQFQNRQVANALFAVLSAVAQIGLAFLTAGATAPGAVVSAGQAVSIAGQAAQGLRRVVEILEQLEAVMEVVAAVKDLVDSLEQVGQIVDAPVMPELPSEADWSIFVNEVEAVAEGMPTEVSEVPAWKAKCKNVAALGREMCITAEQISQLQYDIWVQGMMRDMARSQADRLAAIQPADLTNYLEMATQMDMRTTRMLLGLLNIMRIQNAALRYEYLLMPTELTTWPLGMDTVGDLLIAQENAALIGLMQLGPSSDFTSRHVVKGIPVSLLLDGGDWEFEIPVQGGMSSFPSSWTRVRIRHLEMHFVQEASGIGGEIIHQPTTQTGTVYILLQGSTIFHDRRRDQVLPFQAAAPLNYHYAYRLDTGEATLTNEPSEQFANTFMQMTPFTRWRLRLSAAAKENAGLAFPTATALDSTTQIVITFHVTAIRQIDWRHEEE

SEQ ID NO: 588 - protein, 866 aa, synthetic construct
  REGION 1..866: note = Synthetic
MALVDYGKLFEDLNQISMGVLDRVEFSEVMVIHRMYVRLADLNVGQLEGAEKVKRLYVFADVVELPVVEWRWPPQIPGSVTVIILCRLLQWPTDGRQSDTELHLTFMKLHAIQREENRWEITAADGMNWGVYIHAEEVQVGVLTMSWSSVLRVSALRSVITSGFRAVSVFEVPGSVRSTLGATLRPDHALYSTTMQATPNASHISAFNLRIVSPSAYRVCPLQNDTDTYLGIPADVAAVLPVDVVTDPNILLGMQTTVHIAELVKACHPSPDVVSAVGEHLNWLNKLLLPLKESTQLQGSESYKECLALLGRVHAAMKMVRIGLVVPQLQYRMYGSLINQMAQVAQNYDREFKQFKLFIIQNQILGSYLLQQNRAFAERELQMESFHAAVISQRREELDNTFAKMDRLSGQMEAESSAMEQAKKEMDEGLRQFQNRQVANALFAVLSAVAQIGLAFLTAGATAPGAVASAGQAVSIAGQAAQGLRRVVEILEGLEAVMEVVAAVKDLVDSLEQVGQIVDAPVMPELPSEADWSIFVNEIEAVAEGMPTEVSEVPAWRAKCKNVAALGREMSITAVQMSELQYDIWVQGMMRDMARSQADRLAAIQPADLTNYLEMAIQMDMRTTRMLLGLLNILRIQNAALRYEYLLMPTELTTWPLGMDTVGDLLIAQENAALIGLAQLGPPSDFTSRHVVKGIPVSLLLDGGDWEFEIPVQGGMSSFPSSWSRVRIRHLEMHFVQEASGGGEIIHQPATQTGTIYILLQGSTVFHDRRRDQVLPFQAAAPLNYHYAYRLDTGEATLTNEPSEQFANKFMQMTPFTHWRLRLSASAAENKGLAFPTATAPDSTTEIVITFHVTAIRQIDWRQEEE

SEQ ID NO: 589 - protein, 866 aa, synthetic construct
  REGION 1..866: note = Synthetic
MALVDYGKLFEDLNQISMGVLDRVEFSEVMVIHRMYVRLADLNVGQLEGAEKVKRLYVFADVVELPVVEWRWPPQIPGSVTVIILCRLLQWPTDGRQSDTELHLTFMKLHAIQREENRWEITAADGMNWGVYIHAEEVQVGVLTMSWSSVLRVSALRSVITSGFRAVSVFEVPGSVRSTLGATLRPDHALYSTTMQATPNASHISAFNLRIVSPSAYRVCPLQNDTDTYLGIPADVAAVLPVDVVTDPNILLGMQTTVHIAELVKACHPSPDVVSAVGEHLNWLNKLLLPLKESTQLQGSESYKECLALLGRVHAAMKMVRIGLVVPQLQYRMYGSLINQMAQVAQNYDREFKQFKLFIIQNQILGSYLLQQNRAFAERELQMESFHAAVISQRREELDNTFAKMDRLSGQMEAESSAMEQAKKEMDEGLRQFQNRQVANALFAVLSAVAQIGLAFLTAGATAPGAVASAGQAVSIAGQAAQGLRRVVEILEGLEAVMEVVAAIKHLVDALEQVGQIVDAPPMPDMPSEADWSIFVNEVEAVAEGMPTEVSEVPAWKAKCKNVAALGREMSITAVQMSELQYDIWVQGLLRDIARSQADRLAAIQPADLTNYLEMATQMDMRTTRMLLGLLNILRIQNAALRYEYLLMPTELTTWPLGMDTVGDLLITHESAALSGLAQLGPPSDFTSRHVVKGIPVSLLLDGGDWEFEIPVQGGMSSFPSSWTRVRIRHLEMHFVQEASGGGEIIHQPTTQTGTVYILLQGSTVFHDRRRDQVLPFQAAAPLNYHYAYRLDTGDSTLTNEPSEQFANKFMQMTPFTRWRLRLSASAKENAGLAFPTATAPDSTTQIVITFHVTAIRQIDWRQEEE

SEQ ID NO: 590 - protein, 866 aa, synthetic construct
  REGION 1..866: note = Synthetic
MALVDYGKLFEDLNQISMGVLDRVEFSEVMVIHRMYVRLADLNVGQLEGAEKVKRLYVFADVVELPVVEWRWPPQIPGSVTVIILCRLLQWPTDGRQSDTELHLTFMKLHAIQREENRWEITAADGMNWGVYIHAEEVQVGVLTMSWSSVLRVSALRSVITSGFRAVSVFEVPGSVRSTLGATLRPDHALYSTTMQATPNASHISAFNLRIVSPSAYRVCPLQNDTDTYLGIPADVAAVLPVDVVTDPNILLGMQTTVHIAELVKACHPSPDVVSAVGEHLNWLNKLLLPLKESTQLQGSESYKECLALLGRVHAAMKMVRIGLVVPQLQYRMYGSLINQMAQVAQNYDREFKQFKLFIIQNQILGSYLLQQNRAFAERELQMESFHAAVISQRREELDDAIAKMDRLSLQMEEEDRAMEQARKEMEEGLKQFQNEQVARAVFAVLKSVAQIGLAFVTAGATAPGAVASAGQAVSIAGQAAQGLRRVVEILEGLEAVMEVVAAVKDLVDSLEQVGQIVDAPVMPELPSEADWSIFVNEVEAVAEGMPTEVSEVPAWKAKCKNVAALGREMSITAEQMSELQYDIWVQGMMRDMARSQADRLAAIQPADLTNYLEMATQMDMRTTRMLLGLLNIMRIQNAALRYEYLLMPTELTTWPLGMDTVGDLLITHESAALSGLAQLGPPSDFTSRHVVKGIPVSLLLDGGDWEFEIPVQGGMSSFPSSWSRVRIRHLEMHFVKEASGGGEIIHQPATQTGTIYILLQGSTIFHDRRREEVMTFQAAVPLNYHYAYRLDTGDSTLTNEPSEQFANTFMQMTPFTRWRLRLSASAAENKGLAFPTATAPDSTTEIVITFHVTAIRQIDWRQEEE

SEQ ID NO: 591 - protein, 866 aa, synthetic construct
  REGION 1..866: note = Synthetic
MALVDYGKLFEDLNQISMGVLDRVEFSEVMVIHRMYVRLADLNVGQLEGAEKVKRLYVFADVVELPVVEWRWPPQIPGSVTVIILCRLLQWPTDGRQSDTELHLTFMKLHAIQREENRWEITAADGMNWGVYIHAEEVQVGVLTMSWSSVLRVSALRSVITSGFRAVSVFEVPGSVRSTLGATLRPDHALYSTTMQATPNASHISAFNLRIVSPSAYRVCPLQNDTDTYLGIPADVAAVLPVDVVTDPNILLGMQTTVHIAELVKACHPSPDVVSAVGEHLNWLNKLLLPLKESTQLQGSESYKECLALLGRVHAAMKMVRIGLVVPQLQYRMYGSLIRQMAQVAQNYDREFKQFKLFIIQNQILGSYLLQQNRAFAERELQMESFHAAVISQRRQELDDAIAKMDRLSLQMEEEDRAMEQARKEMDEGLRQFQNRQVANALFAVLSAVAQIGLAFLTAGATAPGAVASAGQAVSIAGQAAQGLRRVVEILEQLEAVMEVVAAVKDLVDSLEQVGQIVDAPVMPELPSEADWSIFVNEIEAVAEGMPTEVSEVPVWRAKCKNVAALGREMCITAVQMSELQYDIWVQGLLRDMARSQADRLAAIQPADLTNYLEMATQMDMRTTRMLLGLLNILRIQNAALRYEYLLMPTQLTAWPLRMDTVANLLITHESAALSGLAQLGPPSDFTSRHVVKGIPVSLLLDGGDWEFEIPVQGGMSSFPSSWTRVRIRHLEMHFVQEASGGGEIIHQPTTQTGTVYILLQGSTIFHDRRRDQVLPFQAAAPLNYHYAYRLDTGDSTLTNEPSEQFANKFMQMTPFTRWRLRLSASAKENAGLAFPTATALDSTTQIVITFHVTAIRQIDWRHDEE

SEQ ID NO: 592 - protein, 867 aa, synthetic construct
  REGION 1..867: note = Synthetic
MALVDYGKLFEDLNQISMGVLDRVEFSEVMVIHRMYVRLADLNVGQLEGAEKVKRLYVFADVVELPVVEWRWPPQIPGSVTVIILCRLLQWPTDGRQSDTELHLTFMKLHAIQREENRWEITAADGMNWGVYIHAEEVQVGVLTMSWSSVLRVSALRSVITSDFRAVSVFEVPGSVRSTLGATLRPDHALYSTTMQATPNASHISAFNLRIVSPSAYRVCPLQNDTDTYLGIPADVAAVLPVDVVTDPNILLGMQTTVHIAELVKACHPSPDVVSAVGEHLNWLNKLLLPLKESTQLQGSESYKECLALLGRVHAAMKMVRIGLVVPQLQYRMYGSLINQMAQVAQNYDREFKQFKLFIIQNQILGSYLLQQNRAFAEREVQMESFHSAVISQRRQELDNTFAKMDRLSLQMEEEDRAMEQARKEMEEGLKQFQNEQVARAVFAVLKSVAMIALAFVTAGATAPGAVASAGQAVSIAGQAAQALRRVVEILEGLEAVMEVVAAVKDLVDSLEQVGQIVDAPVMPELPSEADWSIFVNEVEAVAEGMPTEVSEVPAWKAKCKNVAALGREMCITAVQMSELQYDIWVQGMMRDMARSQADRLAAIQPADLTNYLEMATQMDMRTTRILIGLLNILRIQNAALMYEYLLTPTQLTAWPLRMDTVANLLITHESAALSGLAQLGPPSDFTSRHVVKDIPVNLLLDGEDWEFEIPVQAGMSSFPSSWTRVRIRHLEMHFVKEASGIGGEIIHQPATQTGTVYILLQGSTIFHDRRREEVMTFQAAVPLNYHYAYRLDTGEATLTNEPSEQFANTFMQMTPFTHWRLRLSASAAENKGLAFPTATALDSTTQIVITFHVTAIRQIDWRHDEE

SEQ ID NO: 593 - protein, 866 aa, synthetic construct
  REGION 1..866: note = Synthetic
MALVDYGKLFEDLNQISMGVLDRVEFSEVMVIHRMYVRLADLNVGQLEGAEKVKRLYVFADVVELPVVEWRWPPQIPGSVTVIILCRLLQWPTDGRQSDTELHLTFMKLHAIQREENRWEITAADGMNWGVYIHAEEVQVGVLTMSWSSVLRVSALRSVITSGFRAVSVFEVPGSVRSTLGATLRPDHALYSTTMQATPNASHISAFNLRIVSPSAYRVCPLQNDTDTYLGIPADVAAVLPVDVVTDPNILLGMQTTVHIAELVKACHPSPDVVSAVGEHLNWLNKLLLPLKESTQLQGSESYKECLALLGRVHAAMKMVRIGLVVPQLQYRMYGSLINQMAQVAQNYDREFKQFKLFIIQNQILGSYLLQQNRAFAERELQMESFHAAVISQRREELDNTFAKMDRLSGQMEEEDRAMEQARKEMEEGLKQFQNEQVARAVFAVLKSVAQIGLAFLTAGATAPGAVASAGQAVSIAGQAAQGLRRVVEILEQLEAVMEVVAAVKDLVDSLEQVGQIVDAPVMPELPSEADWSIFVNEVEAVAEGMPTEVSEVPVWKAKCKNVAALGREMSITAVQMSELQYDIWVQGMMRDMARSQADRLAAIQPADLTNYLEMAIQMDMRTTRMLLGLLNILRIQNAALRYEYLLMPTELTTWPLGMDTVANLLITHESAALSGLAQLGPSSDFSSRHVVKGIPVSLLLDGGDWEFEIPVQAGMSSFPSSWSRVRIRHLEMHFVKEASGGGEIIHQPTTQTGTIYILLQGSTVFHDRRREEVMTFQAAVPLNYHYAYRLDTGEATLTNEPSEQFANKFMQMTPFTRWRLRLSASAKENAGLAFPTATALDSTTQIVITFHVTAIRQIDWRQEEE

SEQ ID NO: 594 - protein, 866 aa, synthetic construct
  REGION 1..866: note = Synthetic
MALVDYGKLFEDLNQISMGVLDRVEFSEVMVIHRMYVRLADLNVGQLEGAEKVKRLYVFADVVELPVVEWRWPPQIPGSVTVIILCRLLQWPTDGRQSDTELHLTFMKLHAIQREENRWEITAADGMNWGVYIHAEEVQVGVLTMSWSSVLRVSALRSVITSGFRAVSVFEVPGSVRSTLGATLRPDHALYSTTMQATPNASHISAFNLRIVSPSAYRVCPLQNDTDTYLGIPADVAAVLPVDVVTDPNILLGMQTTVHIAELVKACHPSPDVVSAVGEHLNWLNKLLLPLKESTQLQGSESYKECLALLGRVHAAMKMVRIGLVVPQLQYRMYGSLINQMAQVAQNYDREFKQFKLFIIQNQILGSYLLQQNKAFADREVQMESFHAAVISQRREELDNTFAKMDRLSGQMEAESSAMEQAKKEMDEGLRQFQNEQVARAVFAVLKSVAMIALAFVTAGATAPGAVASAGQAVSIAGQAAQGLRRVVEILEGLEAVMEVVAAVKDLVDSLEQVGQIVDAPVMPELPSEADWSIFVNEVEAVAEGMPTEVSEVPAWRAKCKNVAALGREMCITAVQISQLQYDIWVQGMMRDMARSQADRLAAIQPADLTNYLEMATQMDMRTTRMLLGLLNILRIQNAALRYEYLLMPTELTTWPLGMDTVGDLLIAQENAALIGLMQLGPPSDFTSRHVVKDIPVNLLLDGEDWEFEIPVQAGMSSFPSSWSRVRIRHLEMHFVQEASGGGEIIHQPTTQTGTVYILLQGSTIFHDRRRDQVLPFQAAAPLNYHYAYRLDTGEATLTNEPSEQFANTFMQMTPFTHWRLRLSASAAENKGLAFPTATAPDSTTEIAITFHVTAIRQIDWRHDEE

SEQ ID NO: 595 - protein, 682 aa, synthetic construct
  REGION 1..682: note = Synthetic
MDYSTLYRDLNQISMPLDRVEFSEVMVIHRMYVRLADLNVGELPGAERVKRLYVLADVVTDPNILMGMQTSVHIAELVKACYPSPELVSAVGVHVNWLNEVLLRVVQKESQLQGTEAYNECLALLGRIQCVMKMGPFVSVVPQLQYRMYGSLIRQMAQVAQNYDQDFRQLKLFIAQNQILGSYLLQQNKAFADREVQMESFHSAVISQRRQELDDAIAKMDRLSLQMEEEDRAMEQARKEMEEGLKQFQNEQVARAVFAVLKSVAMIALAFVTAGATAPGAAASAAQAVSIAGQAAQGLRRVVEILEQLEAVMEVVAAVKDLVDSLEQVGQIVDAPVMPELPSEADWSIFVNEVEAVAEGMPTEVSEVPVWRAKCKNVAALGREMCITAVQMSELQYDIWVQGMMRDIAQSHADRLAAIQPANLTNYLEMATQMDMRTTRMLLGLLNILRIQNAALRYEYLLMPTELTTWPLGMDTVGDLLIAQENAALIGLMQLGPSSDFTSRHVVKGIPVSLLLDGGDWEFEIPVQGGMSSFPSSWSRVRIRHLEMHFVKEASGIGGEIIHQPTTQTGTVYILLQGSTVFHDRRREEVMTFQAAVPLNYHYAYRLDTGDSTLTNEPSEQFANTFMQMTPFTRWRLRLSASAAENKGLAFPTATAPDSTTEIAITFHVTAIRQIDWRHDEE

SEQ ID NO: 596 - protein, 855 aa, synthetic construct
  REGION 1..855: note = Synthetic
MALVDYGKLFEDLNQISMGVLDRVEFSEVMVIHRMYVRLADLNVGQLEGAEKVKRLYVFADVVELPVVEWRWPPQIPGSVTVIILCRLLQFPTDGSFAAWLELPFMELHTLIEQYRSEIKAADDAKWGTYVHAEEVQLSPLFNGWPYLVVEAQRCIITAAMHNTFNRPGWVRSITQFTTDQSGRVDTTLLARTEFGHIDLPLETDSPTAFSVSHRQSTNLPVEYTGIPVEVVTDPNILMGMQTTVHIAELVKACHPSPDVVSAVGEHLNWLNEVLLRVVQKESQLQGTEAYNECLALLGRIQCVMKMGPFVSVVPQLQYRMYGSLINQMAQVAQNYDQDFRQLKLFIAQNQILGSYLLQQNRAFADREVQMESFHSAVISQRRQELDDAIAKMDRLSLQMEEEDRAMEQAKKEMDEGLRQFQNRQVANALFAVLSAVAQIGLAFLTAGATAPGAVASAGQAVSIAGQAAQGLRRVVEILEGLEAVMEVVAAVKDLVDSLEQVGQIVDAPVMPELPSEADWSIFVNEVEAVAEGMPTEVSEVPVWKAKCKNVAALGREMSITAEQMSELQYDIWVQGLMRDMARSQADRLAAIQPADLTNYLEMATQMDMRTTRMLLGLLNIMRIQNAALRYEYLLMPTELTTWPLGMDTVGDLLIAQENAALIGLMQLGPPSDFTSRHVVKGIPVSLLLDGGDWEFEIPVQAGMSSFPSSWTRVRIRHLEMHFVKEASGIGGEIIHQPTTQTGTVYILLQGSTIFHDRRRDQVLPFQAAAPLNYHYAYRLDTGEATLTNEPSEQFANTFMQMTPFTRWRLRLSASAKENAGLAFPTATALDSTTQIVITFHVTAIRQIDWRHDEE

SEQ ID NO: 597 - protein, 853 aa, synthetic construct
  REGION 1..853: note = Synthetic
MDYSTLYRDLNQISMPLDRVEFSEVMVIHRMYVRLADLNVGQLEGAEKVKRLYVLADVVELATFAHPQLLNTRMPGSVTVIILCRLLQFPTDGSFAAWLELPFMELHTLIGQYRSEIKAADDAKWGTYVHAEEVQLSPLFNGWPYLVVEAQRCIITAAMHNTFNRPGWVRSITQFTTDQSGRVDTTLLARTEFGHIDLPLETDSPTAFSVSHRQSTNLPVEYTGIPVEVVTDPNILMGMQTSVHIAELVKACYPSPDVVSAVGVHVNWLNEVLLRVVQKESQLQGTEAYNECLALLGRIQCVMKMGPFVSVVPQLQYRMYGSLIRQMAQVAQNYDQDFRQLKLFIAQNQILGSYLLQQNKAFADREVQMESFHAAVISQRRQELDDAIAKMDRLSLQMEEEDRAMEQAKKEMDEGLRQFQNRQVANALFAVLSAVAQIGLAFLTAGATAPGAVASAGQAVSIAGQAAQGLRRVVEILEGLEAVMEVVAAVKDLVDSLEQVGQIVDAPVMPELPSEADWSIFVNEVEAVAEGMPTEVSEVPVWRAKCKNVAALGREMCITAEQISQLQYDIWVQGLLRDIAQSHADRLAAIQPANLTNYLEMAIQMDMRTTRILIGLLNIMRIQNAALMYEYLLTPTQLTAWPLRMDTVANLLITHESAALSGLAQLGPPSDFTSRHVVKGIPVSLLLDGGDWEFEIPVQGGMSSFPSSWTRVRIRHLEMHFVQEASGIGGEIIHQPTTQTGTIYILLQGSTVFHDRRREEVMTFQAAVPLNYHYAYRLDTGDSTLTNEPSEQFANTFMQVTPFTRWRLRLSASAKENAGLAFPTATALDSTTQIVITFHVTAIRQIDWRHDEE

SEQ ID NO: 598 - protein, 855 aa, synthetic construct
  REGION 1..855: note = Synthetic
MALVDYGKLFEDLNQISMPLDRVEFSEVMVIHRMYVRLADLNVGQLEGAERVKRLYVLADVVELATFAHPQLLNTRMPGSVTVIILCRLLQFPTDGSFAAWLELPFMELHTLIEQYRSEIKAADDAKWGTYVHAEEVQLSPLFNGWPYLVVEAQRCIITAAMHNTFNRPGWVRSITQFTTDQSGRVDTTLLARTEFGHIDLPLETDSPTAFSVSHRQSTNLPVEYTGIPVEVVTDPNILMGMQTSVHIAELVKACYPSPELVSAVGVHVNWLNEVLLRVVQKESQLQGTEAYNECLALLGRIQCVMKMGPFVSVVPQLQYRMYGSLINQMAQVAQNYDQDFRQLKLFIAQNQILGSYLLQQNRAFAERELQMESFHAAVISQRREELDNTFAKMDRLSLQMEEEDRAMEQAKREMDEGLRQFQNEQVARAVFAVLKSVAMIALAFVTAGATAPGAVASAGQAVSIAGQAAQGLRRVVEILEGLEAVMEVVAAIKHLVDALDQVSQIVDAPVMPELPSEADWSIFVNEVEAVAEGMPTEVSEVPVWRAKCKNVAALGREMCITAEQISQLQYDIWVQGLLRDIAQSHADRLAAIQPADLTNYLEMATQMDMRTTRMLLGLLNILRIQNAALRYEYLLMPTELTTWPLGMDTVGDLLITHESAALSGLAQLGPPSDFTSRHVVKDIPVNLLLDGEDWEFEIPVQAGMSSFPSSWTRVRIRHLEMHFVQEASGGGEIIHQPTTQTGTVYILLQGSTVFHDRRREEVMTFQAAVPLNYHYAYRLDTGDSTLTNEPSEQFANKFMQMTPFTHWRLRLSASAAENKGLAFPTATAPDSTTEIAITFHVTAIRQIDWRHDEE

SEQ ID NO: 599 - protein, 855 aa, synthetic construct
  REGION 1..855: note = Synthetic
MALVDYGKLFEDLNQISMPLDRVEFSEEMVIHRMYVRLADLNVGQLEGAEKVKRLYVLADVVELATFAHPQLLNTRMPGSVTVIILCRLLQFPTDGSFAAWLELPFMELHTLIEQYRSEIKAADDAKWGTYVHAEEVQLSPLFNGWPYLVVEAQRCIITAAMHNTFNRPGWVRSITQFTTDQSGRVDTTLLARTEFGHIDLPLETDSPTAFSVSHRQSTNLPVEYTGIPVEVVTDPNILMGMQTSVHIAELVKACYPSPELVSAVGVHVNWLNEVLLRVVQKESQLQGTEAYNECLALLGRIQCVMKMGPFVSVVPQLQYRMYGSLIRQMAQVAQNYDREFKQFKLFIIQNQILGSYLLQQNRAFAERELQMESFHSAVISQRRQELDDAIAKMDRLSLQMEAESSAMEQAKKEMDEGLRQFQNRQVANALFAVLSAVAQIGLAFLTAGATAPGAVASAGQAVSIAGQAAQGLRRVVEILEQLEAVMEVVAAVKDLVDSLEQVGQIVDAPVMPELPSEADWSIFVNEIEAVAEGMPTEVSEVPAWKAKCKNVAALGREMCITAEQISQLQYDIWVQGLLRDIAQSHADRLAAIQPANLTNYLEMAIQMDMRTTRMLPGLLNILRIQNAALRYEYLLMPTELTTWPLGMDTVGDLLIAQENAALIGLMQLGPSSDFTSRHVVKGIPVSLLLDGGDWEFEIPVQAGMSSFPSSWSRVRIRHLEMHFVQEASGGGEIIHQPATQTGTIYILLQGSTVFHDRRRDQVLPFQAAAPPNYHYAYRLDTGDSTLTNEPSEQFANTFMQMTPFTHWRLRLSASAAENKGLAFPTATALDSTTEIAITFHVTAIRQIDWRHDEE

SEQ ID NO: 600 - protein, 856 aa, synthetic construct
  REGION 1..856: note = Synthetic
MALVDYGKLFEDLNQISMGVLDRVESSEVMVIHRMYVRLADLNVGELPGAERVKRLYVLADVVELATFAHPQLLNTRMPGSVTVIILCRLLQFPTDGSFAAWLELPFMELHTLIEQYRSEIKAADDAKWGTYVHAEEVQLSPLFNGWPYLVVEAQRCIITAAMHNTFNRPGWVRSITQFTTDQSGRVDTTLLARTEFGHIDLPLETDSPTAFSVSHRQSTNLPVEYTGIPVEVVTDPNILMGMQTSVHIAELVKACYPSPELVSAVGVHVNWLNEVLLRVVQKESQLQGTEAYNECLALLGRFQCVMKMGPFVSVVPQLQYRMYGSLINQMAQVAQNYDQDFRQLKLFIAQNQILGSYLLQQNRAFAERELQMESFHAAVISQRRQELDDAIAKMDRLSLQMEAESSAMEQAKKEMDEGLRQFQNRQVANALFAVLSAVAQIALAFVTAGATAPGAVASAGQAVSIAGQAAQGLRRVVEILEGLEAVMEVVAAIKHLVDALDQVSQIVDAPPMPDMPSEADWSIFVNEIEAVAEGMPTEVSEVPVWRAKCKNVAALGREMCITAVQMSELQYDIWVQGMMRDMARSQADRLAAIQPADLTNYLEMAIQMDMRTTRMLLGLLNILRIQNAALRYEYLLMPTELTTWPLGMDTVGDLLIAQENAALIGLMQLGPSSDFTSRHVVKDIPVNLLLDGEDWEFEIPVQGGMSSFPSSWTRVRIRHLEMHFVQEASGGGEIIHQPATQTGTIYILLQGSTVFHDRRREEVMTFQAAVPLNYHYAYRLDTGEATLTDEPSEQFANKFMQMTPFTRWRLRLSASAAENKGLAFPTATAPDSTTEIAITFHVTAIRQIDWRQEEE

SEQ ID NO: 601 - protein, 853 aa, synthetic construct
  REGION 1..853: note = Synthetic
MDYSTLYRDLNQISMPLDRVEFSEVMEIHRMYVRLADLNVGQLEGAERVKRLYVFADVVELATFAHPQLLNTRMPGSATVIILCRLLQFPTDGSFAAWLELPFMELHTLIEQYRSEIKAADDAKWGTYVHAEEVQLSPLFNGWPYLVVEAQRCIITAAMHNTFNRPGWVRSITQFTTDQSGRVDTTLLARTEFGHIDLPLETDSPTAFSVSHRQSTNLPVEYTGIPVEVVTDPNILLGMQTTVHIAELVKACHPSPDVVSAVGVHVNWLNEVLLRVVQKESQLQGTEAYNECLALLGRIQCVMKMGPFVSVVPQLQYRMYGSLIRQMAQVAQNYDQDFRQLKLFIAQNQILGSYLLQQNKAFADREVQMESFHAAVISQRREELDNTFAKMDRLSGQMEEEDRAMEQARKEMEEGLRQFQNRQVANALFAVLSAVAQIGLAFLTAGATAPGAVASAGQAVSIAGQAAQGLRRVVEILEGLEAVMEVVAAIKHLVDALDQVSQIVDAPPMPDMPSEADWSIFVNEIEAVAEGMPTEVSEVPVWRAKCKNVAALGREMSITAVQMSELQYDIWVQGLLRDIAQSHADRLAAIQPANLTNYLEMATQMDMRTTRMLLGLLNIMRIQNAALMYEYLLTPTQLTAWPLRMDTVANLLITHESAALSGLAQLGPPSDFTSRHVVKGIPVSLLLDGGDWEFEIPVQAGMSSFPSSWSRVRIRHLEMHFVKEASGIGGEIIHQPATQTGTIYILLQGSTVFHDRRRDQVLPFQAAAPLNYHYAYRLDTGEATLTNEPSEQFANKFMQMTPFTRWRLRLSASAAENEGLAFPTATAPDSTTEIAITFHVTAIRQIDWRQEEE

SEQ ID NO: 602 - protein, 855 aa, synthetic construct
  REGION 1..855: note = Synthetic
MALVDYGKLFEDLNQISMPLDRVEFSEVMVIHRMYVRLADLNVGELPGAERVKRLYVLADVVELATFAHPQLLNTRMPGSVTVIILCRLLQFPTDGSFAAWLELPFMELHTLIEQYRSEIKAADDAKWGTYVHAEEVQLSPLFNGWPYLVVEAQRCIITAAMHNTFNRPGWVRSITQFTTDQSGRVDTTLLARTEFGHIDLPLETDSPTAFSVSHRQSTNLPVEYTGIPVEVVTDPNILMGMQTSVHIAELVKACYPSPDVVSAVGVHVNWLNEVLLRVVQKESQLQGTEAYNECLALLGRIQCVMKMGPFVSVVPQLQYRMYGSLIRQMAQVAQNYDQDFRQLKLFIAQNQILGSYLLQQNRAFADREVQMESFHAAVISQRREELDNTFAKMDRLSLQMEEEDRAMEQARKEMEEGLKQFQNEQVARAVFAVLKSVAMIALAFVTAGATAPGAVASAGQAVSIAGQAAQGLRRVVEILEGLEAVMEVVAAIKHLVDALDQVSQIVDAPPMPDMPSEADWSIFVNEIEAVAEGMPTEVSEVPVWKAKCKNVAALGREMCITAEQISQLQYDIWVQGMMRDMARSQADRLAAIQPADLTNYLEMATQMDMRTTRILIGLLNIMRIQNAALRYEYLLMPTELTTWPLGMDTVGDLLIAQENAALSGLAQLGPPSDFTSRHVVKDIPVSLLLDGGDWEFEIPVQGGMSSFPSSWTRVRIRHLEMHFVQEASGGGEIIHQPATQTGTIYILLQGSTVFHDRRREEVMTFQAAVPLNYHYAYRLDTGDSTLTNEPSEQFANTFMQMTPFTHWRLRLSASAKENAGLAFPTATALDSTTEIVITFHVTAIRQIDWRHEEE

SEQ ID NO: 603 - protein, 852 aa, synthetic construct
  REGION 1..852: note = Synthetic
MDYSTLYRDLNQISMPLDRVEFSEVMVIHRMYVRLADLNVGQLEGAEKVKRLYVLADVVELATFAHPQLLNTRMPGSVTVIILCRLLQFPTDGSFAAWLELPFMELHTLIEQYRSEIKAADDAKWGTYVHAEEVQLSPLFNGWPYLVVEAQRCIITAAMHNTFNRPGWVRSITQFTTDQSGRVDTTLLARTEFGHIDLPLETDSPTAFSVSHRQSTNLPVEYTGIPVEVVTDPNILMGMQTTVHIAELVKACHPSPDVVSAVGVHLNWLNEVLLRVVQKESQLQGTEAYNECLALLGRIQCVMKMGPFVSVVPQLQYRMYGSLIRQMAQVAQNYDQDFRQLKLFIAQNQILGSYLLQQNRAFADREVQMESFHSAVISQRREELDNTFAKMDRLSGQMEAESSAMEQAKKEMEEGLRQFQNRQVANALFAVLSAVAQIGLAFLTAGATAPGAVASAGQAVSIAGQAAQGLRRVVEILEGLEAVMEVVAAVKDLVDSLEQVGQIVDAPVMPELPSEADWSIFVNEVEAVAEGMPTEVSEVPVWKAKCKNVAALGREMCITAVQMSELQYDIWVQGMMRDMARSQADRLAAIQPADLTNYLEMATQMDMRTTRILIGLLNIMRIQNAALMYEYLLTPTQLTAWPLRMDTVANLLITHESAALSGLAQLGPPSDFTSRHVVKDIPVNLLLDGGDWEFEIPVQGGMSSFPSSWTRVRIRHLEMHFVQEASGGGEIIHQPATQTGTVYILLQGSTIFHDRRREEVMTFQAAVPLNYHYAYRLDTGDSTLTNEPSEQFANKFMQMTPFTRWRLRLSASAKENAGLAFPTATALDSTTEIAITFHVTAIRQIDWRQEEE

SEQ ID NO: 604 - protein, 852 aa, synthetic construct
  REGION 1..852: note = Synthetic
MDYSTLYRDLNQISMPLDRVEFSEVMVIHRMYVRLADLNVGQLEGAEKVKRLYVLADVVELATFAHPQLLNTRMPGSVTVIILCRLLQFPTDGSFAAWLELPFMELHTLIEQYRSEIKAADDAKWGTYVHAEEVQLSPLFNGWPYLVVEAQRCIITAAMHNTFNRPGWVRSITQFTTDQSGRVDTTLLARTEFGHIDLPLETDSPTAFSVSHRQSTNLPVEYTGIPVEVVTDPNILMGMQTTVHIAELVKACHPSPDVVSAVGVHVNWLNEVLLRVVQKESQLQGTEAYNECLALLGRIQCVMKMGPFVSVVPQLQYRMYGSLIRQMAQVAQNYDQDFRQLKLFIAQNQILGSYLLQQNRAFAERELQMESFHAAVISQRREELDNTFAKMDRLSGQMEAESSAMEQAKKEMDEGLRQFQNRQVANALFAVLSAVAQIGLAFLTAGATAPGAVASAGQAVSIAGQAAQGLRRVVEILEGLEAVMEVVAAIKHLVDALDQVSQIVDAPPMPDMPSEADWSIFVNEIEAVAEGMPTEVSEVPAWKAKCKNVAALGREMCITAEQISQLQYDIWVQGLLRDMARSQADRLAAIQPADLTNYLEMATQMDMRTTRMLLGLLNIMRIQNAALMYEYLLMPTQLTTWPLGMDTVGDLLIAQENAALSGLAQLGPPSDFTSRHVVKGIPVSLLLDGGDWEFEIPVQGGMSSFPSSWTRVRIRHLEMHFVQEASGGGEIIHQPTTQTGTIYILLQGSTVFHDRRRDQVLPFQAAAPLNYHYAYRLDTGEATLTNEPSEQFANKFMQMTPFTRWRLRLSASAKENAGLAFPTATAPDSTTEIAITFHVTAIRQIDWRQEEE

SEQ ID NO: 605 - protein, 852 aa, synthetic construct
  REGION 1..852: note = Synthetic
MDYSTLYRDLNQISMPLDRVEFSEVMVIHRMYVRLADLNVGELPGAERVKRLYVLADVVELATFAHPQLLNTRMPGSVTVIILCRLLQFPTDGSFAAWLELPFLELHTLIEQYRSEIKAADDAKWGTYVHAEEVQLSPLFNGWPYLVVEAQRCIITAAMHNTFNRPGWVRSITQFTTDQSGRVDTTLLARTEFGHIDLPLETDSPTAFSVSHRQSTNLPVEYTGIPVEVVTDPNILMGMQTSVHIAELVKACHPSPDVVSAVGVHVNWLNEVLLRVVQKESQLQGTEAYNECLALLGRIQCVMKMGPFVSVVPQLQYRMYGSLIRQMAQVAQNYDREFKQFKLFIIQNQILGSYLLQQNRAFADREVQMESFHSAVISQRREELDNTFAKMDRLSGQMEAESSAMEQAKKEMDEGLRQFQNRQVANALFAVLSAVAQIGLAFLTAGATAPGAVASAGQAVSIAGQAAQALRRVVEILEGLEAVMEVVAAIKHLVDSLEQVGQIVDAPVMPELPSEADWSIFVNEVEAVAEGMPTEVSEVPAWKAKCKNVAALGREMCITAEQMSELQYDIWVQGLLRDMARSQADRLAAIQPADLTNYLEMAIQMDMRTTRILIGLLNILRIQNAALRYEYLLTPTELTTWPLGMDTVGDLLITHESAALSGLAQLGPPSDFTSRHVVKGIPVSLLLDGGDWEFEIPVQGGMSSFPSSWTRVRIRHLEMHFVKEASGGGEIIHQPTTQTGTIYILLQGSTVFHDRRREEVMTFQAAVPLNYHYAYRLDTGEATLTNEPSEQFANKFMQMTPFTHWRLRLSASAAENKGLAFPTATAPDSTTEIAITFHVTAIRQIDWRQEEE

SEQ ID NO: 606 - protein, 856 aa, synthetic construct
  REGION 1..856: note = Synthetic
MALVDYGKLFEDLNQISMGVLDRVEFSEVMVIHRMYLRLSDLNVGELPGAERVKRLYVLADVVELATFAHPQLLNTRMPGSVTVIILCRLLQFPTDGSFAAWLELPFMELHTLIEQYRSEIKAADDAKWGTYVHAEEVQLSPLFNGWPYLVVEAQRCIITAAMHNTFNRPGWVRSITQFTTDQSGRVDTTLLARTEFGHIDLPLETDSPTAFSVSHRQSTNLPVEYTGIPVEVVTDPNILMGMQTSVHIAELVKACYPSPDVVSAVGEHLNWLNEVLLRVVQKESQLQGTEAYNECLALLGRIQCVMKMVRIGLVVPQLQYRMYGSLIRQMAQVAQNYDQDFRQLKLFIAQNQILGSYLLQQNKAFAERELQMESFHAAVISQRREELDNTFAKMDRLSGQMEAESSAMEQAKKEMDEGLRQFQNEQVARAVFAVLKSVAMIALAFVTAGATAPGAVASAGQAVNIAGQAAQALRRVVEILEGLEAVMEVVAAVKDLVDSLEQVGQIVDAPVMPELPSEADWSIFVNEIEAVAEGMPAEVSEVPAWKAKCKNVAALGREMCITAVQMSELQYDIWVQGMMRDMARSQADRLAAIQPADLTNYLEMATQMDMRTTRMLLGLLNILRIQNAALRYEYLLMPTELTTWPLGMDTVGDLLIAQENAALIGLMQLGPSSDFTSRHVVKGIPVSLLLDGGDWEFEIPVQGGMSSFPSSWSRVRIRHLEMHFVQEASGGGEIIHQPATQTGTIYILLQGSTVFHDRRREEVMTFQAAVPLNYHYAYRLDTGEATLTNEPSEQFANTFMQMTPFTHWRLRLSASAKENAGLAFPTATALDSTTQIVITFHVTAIRQIDWRQEEE

SEQ ID NO: 607 - protein, 857 aa, synthetic construct
  REGION 1..857: note = Synthetic
MALVDYGKLFEDLNQISMGVLDRVEFSEVMVIHRMYVRLADLNVGELPGAERVKRLYVLADVVELATFAHPQLLNTRMPGSVTVIILCRLLQFPTDGSFAAWLELPFMELHTLIEQYRSEIKAADDAKWGTYVHAEEVQLSPLFNGWPYLVVEAQRCIITAAMHNTFNRPGWVRSITQFTTDQSGRVDTTLLARTEFGHIDLPLETDSPTAFSVSHRQSTNLPVEYTGIPVEVVTDPNILMGMQTSVHIAELVKACYPSPELVSAVGVHVNWLNEVLLRVVQKESQLQGTEAYNECLALLGRIQCVMKMGPFVSVVPQLQYRMYGSLIRQMAQVAQNYDQDFRQLKLFIAQNQILGSYLLQQNRAFAERELQMESFHAAVISQRREELDNTFAKMDRLSGQMEAESSAMEQAKREMDEGLRQFQNRQVANALFAVLSAVAQIGLAFVTAGATAPGAVASAGQAVSIAGQAAQGLRRVVEILEQLEAVMEVVAAVKDLVDSLEQVGQIVDAPVMPELPSEADWSIFVNEVEAVAEGMPTEVSEVPVWRAKCKNVAALGREMSITAVQISQLQYDIWVQGLLRDIAQSHADRLAAIQPANLTNYLEMAIQMDMRTTRILIGLLNIMRIQNAALMYEYLLTPTQLTAWPLRMDTVANLLITHESAALSGLAQLGPPSDFTSRHVVKGIPVSLLLDGGDWEFEIPVQGGMSSFPSSWTRVRIRHLEMHFVQEASGIGGEIIHQPTTQTGTIYILLQGSTVFHDRRREEVMTFQAAVPLNYHYAYRLDTGEATLTNEPSEQFANTFMQMTPFTHWRLRLSASAAENKGLAFPTATAPDSTTEIAITFHVTAIRQIDWRHDEE

SEQ ID NO: 608 - DNA, 60 bp, synthetic construct
  misc_feature 1..60: note = Synthetic
  source 1..60: mol_type = other DNA
cgaaatctctcatctaagaggctggatcctaggatggattacagcacgctttacagggac

SEQ ID NO: 609 - DNA, 60 bp, synthetic construct
  misc_feature 1..60: note = Synthetic
  source 1..60: mol_type = other DNA
ttaagttggccaatccagaagatggacaagtctagactactcctcctcttgccgccagtc

SEQ ID NO: 610 - DNA, 60 bp, synthetic construct; identical to SEQ ID NO: 608
  misc_feature 1..60: note = Synthetic
  source 1..60: mol_type = other DNA

SEQ ID NO: 611 - DNA, 23 bp, synthetic construct
  misc_feature 1..23: note = Synthetic
  source 1..23: mol_type = other DNA
caaggattgcattgctaggaagg

SEQ ID NO: 612 - DNA, 60 bp, synthetic construct; identical to SEQ ID NO: 609
  misc_feature 1..60: note = Synthetic
  source 1..60: mol_type = other DNA

SEQ ID NO: 613 - DNA, 23 bp, synthetic construct
  misc_feature 1..23: note = Synthetic
  source 1..23: mol_type = other DNA
ccttcctagcaatgcaatccttg

SEQ ID NO: 614 - DNA, 60 bp, synthetic construct; identical to SEQ ID NO: 608
  misc_feature 1..60: note = Synthetic
  source 1..60: mol_type = other DNA

SEQ ID NO: 615 - DNA, 60 bp, synthetic construct
  misc_feature 1..60: note = Synthetic
  source 1..60: mol_type = other DNA
aagttggccaatccagaagatggacaagtctagactactcctcctctttctcctcctgcc

SEQ ID NO: 616 - DNA, 59 bp, synthetic construct
  misc_feature 1..59: note = Synthetic
  source 1..59: mol_type = other DNA
cgaaatctctcatctaagaggctggatcctaggatggccagtgtactggattacagcac

SEQ ID NO: 617 - DNA, 56 bp, synthetic construct
  misc_feature 1..56: note = Synthetic
  source 1..56: mol_type = other DNA
ttaagttggccaatccagaagatggacaagtctagactactcctcctcgtgccgcc

SEQ ID NO: 618 - DNA, 60 bp, synthetic construct
  misc_feature 1..60: note = Synthetic
  source 1..60: mol_type = other DNA
gaaatctctcatctaagaggctggatcctaggatggattacagcactctttacagggatc

SEQ ID NO: 619 - DNA, 60 bp, synthetic construct; identical to SEQ ID NO: 609
  misc_feature 1..60: note = Synthetic
  source 1..60: mol_type = other DNA

SEQ ID NO: 620 - DNA, 60 bp, synthetic construct; identical to SEQ ID NO: 608
  misc_feature 1..60: note = Synthetic
  source 1..60: mol_type = other DNA

SEQ ID NO: 621 - DNA, 55 bp, synthetic construct
  misc_feature 1..55: note = Synthetic
  source 1..55: mol_type = other DNA
gttggccaatccagaagatggacaagtctagattagagtggcttcgccagtgtcg

SEQ ID NO: 622 - DNA, 60 bp, synthetic construct; identical to SEQ ID NO: 608
  misc_feature 1..60: note = Synthetic
  source 1..60: mol_type = other DNA

SEQ ID NO: 623 - DNA, 60 bp, synthetic construct; identical to SEQ ID NO: 615
  misc_feature 1..60: note = Synthetic
  source 1..60: mol_type = other DNA

SEQ ID NO: 624 - DNA, 60 bp, synthetic construct; identical to SEQ ID NO: 608
  misc_feature 1..60: note = Synthetic
  source 1..60: mol_type = other DNA

SEQ ID NO: 625 - DNA, 60 bp, synthetic construct; identical to SEQ ID NO: 615
  misc_feature 1..60: note = Synthetic
  source 1..60: mol_type = other DNA

SEQ ID NO: 626 - DNA, 26 bp, synthetic construct
  misc_feature 1..26: note = Synthetic
  source 1..26: mol_type = other DNA
gcctttatcgactcctaattcacacc

SEQ ID NO: 627 - DNA, 22 bp, synthetic construct
  misc_feature 1..22: note = Synthetic
  source 1..22: mol_type = other DNA
ccacattgtgcattacgaccac

SEQ ID NO: 628 - DNA, 26 bp, synthetic construct
  misc_feature 1..26: note = Synthetic
  source 1..26: mol_type = other DNA
ccagtgatttgagttccttcattatg

SEQ ID NO: 629 - DNA, 24 bp, synthetic construct
  misc_feature 1..24: note = Synthetic
  source 1..24: mol_type = other DNA
gaacagtacattgactgcatgtgc

SEQ ID NO: 630 - DNA, 51 bp, synthetic construct; identical to SEQ ID NO: 162
  misc_feature 1..51: note = Synthetic
  source 1..51: mol_type = other DNA

SEQ ID NO: 631 - DNA, 23 bp, synthetic construct
  misc_feature 1..23: note = Synthetic
  source 1..23: mol_type = other DNA
gcagccacaacctccatcacagc

SEQ ID NO: 632 - DNA, 52 bp, synthetic construct; identical to SEQ ID NO: 163
  misc_feature 1..52: note = Synthetic
  source 1..52: mol_type = other DNA

SEQ ID NO: 633 - DNA, 23 bp, synthetic construct
  misc_feature 1..23: note = Synthetic
  source 1..23: mol_type = other DNA
gctgtgatggaggttgtggctgc

SEQ ID NO: 634 - DNA, 2601 bp, synthetic construct
  misc_feature 1..2601: note = Synthetic
  source 1..2601: mol_type = other DNA
atggctctcgtggattacggcaagcttttcgaggatctgaaccagataagcatgggtgtactggatcgggtagagttttcagaggtgatggtgatccacaggatgtatgtgaggctagctgatctgaatgtggggcagctcgagggagccgagaaagtgaagcggttgtatgtgtttgcggacgtggtggagctaccagtcgtggaatggcggtggccgccgcaaataccaggatcggtgacggtgatcatattgtgtcgtcttcttcaatggccaactgatgggaggcagtcggacaccgagctccacctgacattcatgaagttgcatgccatacaacgagaggaaaatcggtgggagataaccgcagcagatggcatgaactggggagtttacatacacgcagaggaagtacaggttggcgtgctgacaatgtcatggtcttcggtacttagagtttcggcacttcgctctgttataacctccggctttcgcgccgttagtgtgtttgaggtaccgggaagtgtaaggtccacccttggagctactttaaggcccgatcacgccttatatagtacaactatgcaagccacacccaacgcatcgcatattagtgcttttaaccttcgcatagtttccccgtcggcatatcgtgtttgtcctctccaaaatgacacagatacctacttaggtattccagcagacgtggcggcagttcttccagtagacgtggtgactgatcctaacatcttgctgggcatgcagacaacggtacacattgcggagctagtcaaggcatgtcatccgtcacccgatgttgtgagcgctgtaggggagcacctgaactggctcaacaaactcttactcccacttaaggaatcgactcagttgcaaggaagcgagtcgtacaaggagtgccttgcactcttgggtcgtgttcacgctgcgatgaagatggtgagaattggcttagtagtgccccagctgcaatatcgcatgtacaaagatctcattgatcgaatggtgcaagtggctcagagctacgaccaagacttcaagcagttgaagctgttcgtggaacaaaataagatacttgggagctatttgctagagcaaaacaaggcgtttgctgagaaggaaaaagacatggatgcttttcactcccaagtcattgatctcaggacttctgagcttgaaagcaccattgagagaatggatgacttaagcaaacaaatggaagaacaaaatgcagcaatggagcaagccaaagcggacatggacgcagggttgatagcgtatcaaaacaaacaagtcgcaaatgccgtctttgcggtcttgggggcgatcgccagtattggtctggcatttgcaactggcggggcaactgctcctggagccgtggcttccgcggggcaagctgtgagcatagcaggtcaggcggcgcaaggtctgcgaagggtggtggaaattctagagcagctggaggctgtgatggaggttgtggctgctgtgaaggacctcgtggattcattggaacaggtaggtcagattgtggacgcaccggtgatgccggaattgccctcagaggcggactggtccatttttgtgaacgaggtggaggccgtggcagagggcatgccaacggaagtctcggaggttccggtgtggagggccaagtgcaagaatgtggctgcactgggtcgggagatgagcatcacggcagtacagatgtcggagctgcagtatgacatctgggtgcaaggcatgatgcgggatatggctcgaagccaggcagacaggctggccgcaattcaacccgcggaccttaccaactatttggagatggctacccagatggatatgcggactacgaggatgctgctggggctcctcaacatattgcgcatccagaatgcggcgctcaggtacgagtatcttctaatgcccacggagctcacaacatggccactgggtatggataccgtgggtgacttgctcatcgcgcaggagaatgctgcactgataggattaatgcagctagggccctcatctgatttcacgagcaggcatgtggtgaaagacatacctgtgaacttgctgctcgatggcgaggattgggagtttgagattcctgtgcaagctggcatgtccagcttcccttccagctggtctcgcgtccgtattcggcacctggagatgcactttgtgaaggaggccagcggtattggtggtgagattatccaccagcctaccacccagactgggaccgtttacatccttctgcagggttccactatcttccatgaccgcagaagagaccaggtgttgccttttcaggccgctgctccgctcaactaccattacgcgtaccgcctcgacaccggcgactccactctcacaaacgaaccctctgaacagtttgccaacaagttcatgcagatgacacccttcacccgttggaggcttcgtctgtctgcgtccgcaaaagagaatgcaggattagcctttcccacggctacagcacttgactccactacccagattgtcatcactttccatgttacggccatcagacaaattgactggcggcacgacgaagag

SEQ ID NO: 635 - DNA, 2601 bp, synthetic construct
  misc_feature 1..2601: note = Synthetic
  source 1..2601: mol_type = other DNA
atggctctcgtggattacggcaagcttttcgaggatctgaaccagataagcatgggtgtactggatcgggtagagttttcagaggtgatggtgatccacaggatgtatgtgaggctagctgatctgaatgtggggcagctcgagggagccgagaaagtgaagcggttgtatgtgtttgcggacgtggtggagctaccagtcgtggaatggcggtggccgccgcaaataccaggatcggtgacggtgatcatattgtgtcgtcttcttcaatggccaactgatgggaggcagtcggacaccgagctccacctgacattcatgaagttgcatgccatacaacgagaggaaaatcggtgggagataaccgcagcagatggcatgaactggggagtttacatacacgcagaggaagtacaggttggcgtgctgacaatgtcatggtcttcggtacttagagtttcggcacttcgctctgttataacctccggctttcgcgccgttagtgtgtttgaggtaccgggaagtgtaaggtccacccttggagctactttaaggcccgatcacgccttatatagtacaactatgcaagccacacccaacgcatcgcatattagtgcttttaaccttcgcatagtttccccgtcggcatatcgtgtttgtcctctccaaaatgacacagatacctacttaggtattccagcagacgtggcggcagttcttccagtagacgtggtgactgatcctaacatcttgctgggcatgcagacaacggtacacattgcggagctagtcaaggcatgtcatccgtcacccgatgttgtgagcgctgtaggggagcacctgaactggctcaacaaactcttactcccacttaaggaatcgactcagttgcaaggaagcgagtcgtacaaggagtgccttgcactcttgggtcgtgttcacgctgcgatgaagatggtgagaattggcttagtagtgccccagctgcaatacagaatgtacggtagcctcatcaaccaaatggcccaagtagcacaaaactacgaccgagaattcaagcaattcaaattattcatcatccaaaatcaaatccttggcagctatttgctgcagcagaacagggcatttgctgagagggagctgcagatggagagctttcatgctgctgtcatttctcaaagaagggaggagttggacaatacattcgcaaagatggaccgattgagcgggcaaatggaggcagagagtagtgcaatggagcaagccaaaaaggaaatggacgaaggattgaggcagttccagaataggcaagttgcgaacgccctctttgccgttcttagcgctgtagctcagattgggcttgcattccttacggctggtgcaacggctcctggagccgtggcttccgcaggagcagctgttaccgcagctgggaaggcagctgagggattgaagaaagtggtagagattcttgaaggcttacaagcggtgatggaggtcgtcgctgtcataaaagagctggtacagtccttacaggagatagggcagcttgtggatgcccctgagatgccagatctgccgtcggatgcagaatgggagatttttgtgaatgaagtggaggcagtagcagagcagatgccaacagaggtgacagaggtgcctgcttggaaggccaagtgcaagaatgtggcagcactaggccgagaaatgagcactatggcggcgcacattgcagagttgcagttcgagatacaagtgcaagaaatgttgcgcgagatcgcgaagaaacaggcagataggctgtcgtccatcaagcccgcagacttgacgaactatttggagatggctacccagatggatatgcggactacgaggatgctgctggggctcctcaacatattgcgcatccagaatgcggcgctcaggtacgagtatcttctaatgcccacggagctcacaacatggccactgggtatggataccgtgggtgacttgctcatcgcgcaggagaatgctgcactgataggattaatgcagctagggccctcatctgatttcacgagcaggcatgtggtgaaagacatacctgtgaacttgctgctcgatggcgaggattgggagtttgagattcctgtgcaagctggcatgtccagcttcccttccagctggtctcgcgtccgtattcggcacctggagatgcactttgtgaaggaggccagcggtattggtggtgagattatccaccagcctaccacccagactgggaccgtttacatccttctgcagggttccactatcttccatgaccgcagaagagaccaggtgttgccttttcaggccgctgctccgctcaactaccattacgcgtaccgcctcgacaccggcgactccactctcacaaacgaaccctctgaacagtttgccaacaagttcatgcagatgacacccttcacccgttggaggcttcgtctgtctgcgtccgcaaaagagaatgcaggattagcctttcccacggctacagcacttgactccactacccagattgtcatcactttccatgttacggccatcagacaaattgactggcggcacgacgaagag

SEQ ID NO: 636 - DNA, 2601 bp, synthetic construct
  misc_feature 1..2601: note = Synthetic
  source 1..2601: mol_type = other DNA
atggctctcgtggattacggcaagcttttcgaggatctgaaccagataagcatgggtgtactggatcgggtagagttttcagaggtgatggtgatccacaggatgtatgtgaggctagctgatctgaatgtggggcagctcgagggagccgagaaagtgaagcggttgtatgtgtttgcggacgtggtggagctaccagtcgtggaatggcggtggccgccgcaaataccaggatcggtgacggtgatcatattgtgtcgtcttcttcaatggccaactgatgggaggcagtcggacaccgagctccacctgacattcatgaagttgcatgccatacaacgagaggaaaatcggtgggagataaccgcagcagatggcatgaactggggagtttacatacacgcagaggaagtacaggttggcgtgctgacaatgtcatggtcttcggtacttagagtttcggcacttcgctctgttataacctccggctttcgcgccgttagtgtgtttgaggtaccgggaagtgtaaggtccacccttggagctactttaaggcccgatcacgccttatatagtacaactatgcaagccacacccaacgcatcgcatattagtgcttttaaccttcgcatagtttccccgtcggcatatcgtgtttgtcctctccaaaatgacacagatacctacttaggtattccagcagacgtggcggcagttcttccagtagacgtggtgactgatcctaacatcttgctgggcatgcagacaacggtacacattgcggagctagtcaaggcatgtcatccgtcacccgatgttgtgagcgctgtaggggagcacctgaactggctcaacaaactcttactcccacttaaggaatcgactcagttgcaaggaagcgagtcgtacaaggagtgccttgcactcttgggtcgtgttcacgctgcgatgaagatggtgagaattggcttagtagtgccccagctgcaatacagaatgtacggtagcctcatcaaccaaatggcccaagtagcacaaaactacgaccgagaattcaagcaattcaaattattcatcatccaaaatcaaatccttggcagctatttgctgcagcagaacagggcatttgctgagagggagctgcagatggagagctttcatgctgctgtcatttctcaaagaagggaggagttggacaatacattcgcaaagatggaccgattgagcgggcaaatggaggcagagagtagtgcaatggagcaagccaaaaaggaaatggacgaaggattgaggcagttccagaataggcaagttgcgaacgccctctttgccgttcttagcgctgtagctcagattgggcttgcattccttacggctggtgcaacggctcctggagctgtggcgtcggcggggcaagctgtgagcatagcaggtcaggcggcgcaaggtctgcgaagggtggtggaaattctagagcagctggaggctgtgatggaggttgtggctgctgtgaaggacctcgtggattcattggaacaggtaggtcagattgtggacgcaccggtgatgccggaattgccctcagaggcggactggtccatttttgtgaacgaggtggaggccgtggcagagggcatgccaacggaagtctcggaggttccggtgtggagggccaagtgcaagaatgtggctgcactgggtcgggagatgagcatcacggcagtacagatgtcggagctgcagtatgacatctgggtgcaaggcatgatgcgggatatggctcgaagccaggcagacaggctggccgcaattcaacccgcagacttgacgaactacttggagatggtgtccgaaatggacatgcgcacaacgcgcatgctgttggagctgattcgagtgctgtacatccagaacgcagcattgcagtacgaatatctgcagacaccggcgccattgaatgcatggccagtgacgatgcaaacggtgtgggggttgcttgtgcaacaagagacggccgcaattaacgggctgctgcagatgggggcgccctcggactacacacaagagtatgcggtgagagatgttcctgtgaggttgttactagggggtggagactgggagtttgagattcctgtgcaagctggcatgtccagcttcccttccagctggtctcgcgtccgtattcggcacctggagatgcactttgtgaaggaggccagcggtattggtggtgagattatccaccagcctaccacccagactgggaccgtttacatccttctgcagggttccactatcttccatgaccgcagaagagaccaggtgttgccttttcaggccgctgctccgctcaactaccattacgcgtaccgcctcgacaccggcgactccactctcacaaacgaaccctctgaacagtttgccaacaagttcatgcagatgacacccttcacccgttggaggcttcgtctgtctgcgtccgcaaaagagaatgcaggattagcctttcccacggctacagcacttgactccactacccagattgtcatcactttccatgttacggccatcagacaaattgactggcggcacgacgaagag

SEQ ID NO: 637 - DNA, 2604 bp, synthetic construct
  misc_feature 1..2604: note = Synthetic
  source 1..2604: mol_type = other DNA
atggctctcgtggattacggcaagcttttcgaggatctgaaccagataagcatgggtgtactggatcgggtagagttttcagaggtgatggtgatccacaggatgtatgtgaggctagctgatctgaatgtggggcagctcgagggagccgagaaagtgaagcggttgtatgtgtttgcggacgtggtggagctaccagtcgtggaatggcggtggccgccgcaaataccaggatcggtgacggtgatcatattgtgtcgtcttcttcaatggccaactgatgggaggcagtcggacaccgagctccacctgacattcatgaagttgcatgccatacaacgagaggaaaatcggtgggagataaccgcagcagatggcatgaactggggagtttacatacacgcagaggaagtacaggttggcgtgctgacaatgtcatggtcttcggtacttagagtttcggcacttcgctctgttataacctccggctttcgcgccgttagtgtgtttgaggtaccgggaagtgtaaggtccacccttggagctactttaaggcccgatcacgccttatatagtacaactatgcaagccacacccaacgcatcgcatattagtgcttttaaccttcgcatagtttccccgtcggcatatcgtgtttgtcctctccaaaatgacacagatacctacttaggtattccagcagacgtggcggcagttcttccagtagacgtggtgactgatcctaacatcttgctgggcatgcagacaacggtacacattgcggagctagtcaaggcatgtcatccgtcacccgatgttgtgagcgctgtaggggagcacctgaactggctcaacaaactcttactcccacttaaggaatcgactcagttgcaaggaagcgagtcgtacaaggagtgccttgcactcttgggtcgtgttcacgctgcgatgaagatggtgagaattggcttagtagtgccccagctgcaatacagaatgtacggtagcctcatcaaccaaatggcccaagtagcacaaaactacgaccgagaattcaagcaattcaaattattcatcatccaaaatcaaatccttggcagctatttgctgcagcagaacagggcatttgctgagagggagctgcagatggagagctttcatgctgctgtcatttctcaaagaagggaggagttggacaatacattcgcaaagatggaccgattgagcgggcaaatggaggcagagagtagtgcaatggagcaagccaaaaaggaaatggacgaaggattgaggcagttccagaataggcaagttgcgaacgccctctttgccgttcttagcgctgtagctcagattgggcttgcattccttacggctggtgcaacggctcctggagctgtggcgtcggcggggcaagctgtgagcatagcaggtcaggcggcgcaaggtctgcgaagggtggtggaaattctagagcagctggaggctgtgatggaggttgtggctgctgtgaaggacctcgtggattcattggaacaggtaggtcagattgtggacgcaccggtgatgccggaattgccctcagaggcggactggtccatttttgtgaacgaggtggaggccgtggcagagggcatgccaacggaagtctcggaggttccggtgtggagggccaagtgcaagaatgtggctgcactgggtcgggagatgagcatcacggcagtacagatgtcggagctgcagtatgacatctgggtgcaaggcatgatgcgggatatggctcgaagccaggcagacaggctggccgcaattcaacccgcggaccttaccaactatttggagatggctacccagatggatatgcggactacgaggatgctgctggggctcctcaacatattgcgcatccagaatgcggcgctcaggtacgagtatcttctaatgcccacggagctcacaacatggccactgggtatggataccgtgggtgacttgctcatcgcgcaggagaatgctgcactgataggattaatgcagctagggccctcatctgatttcacgagcaggcatgtggtgaaagacatacctgtgaacttgctgctcgatggcgaggattgggagtttgagattcctgtgcaagctggcatgtccagcttcccttccagctggtctcgcgtccgtattcggcacctggagatgcactttgtgaaggaggccagcggtattggtggtgagattatccaccagcccgtcacaagcacgggggaagtgtacatgctgctgcagagttctcgcttcttcgaggatcgcgccaagcgtgagaacgagttcattagctacgagggcggcatgggccttcagtatcagtatgcctaccgcttggccacgggcgacgccaccgtcaccaacgtccccagcgaggagtatgccaatacttttatgcgcctcgcacccttcactcgttggcgcctccgcctttcggcctccgcgcccgagaacaagggcctcgcatttccaaccgccaccttggccgatgccaccacacgaatcaaaatcacctttcacgtctctgccattcgccgtataagcaccagagtcgccgta

SEQ ID NO: 638 - DNA, 2598 bp, synthetic construct
  misc_feature 1..2598: note = Synthetic
  source 1..2598: mol_type = other DNA
atggctctcgtggattacggcaagcttttcgaggatctgaaccagataagcatgggtgtactggatcgggtagagttttcagaggtgatggtgatccacaggatgtatgtgaggctagctgatctgaatgtggggcagctcgagggagccgagaaagtgaagcggttgtatgtgtttgcggacgtggtggagctaccagtcgtggaatggcggtggccgccgcaaataccaggatcggtgacggtgatcatattgtgtcgtcttcttcaatggccaactgatgggaggcagtcggacaccgagctccacctgacattcatgaagttgcatgccatacaacgagaggaaaatcggtgggagataaccgcagcagatggcatgaactggggagtttacatacacgcagaggaagtacaggttggcgtgctgacaatgtcatggtcttcggtacttagagtttcggcacttcgctctgttataacctccggctttcgcgccgttagtgtgtttgaggtaccgggaagtgtaaggtccacccttggagctactttaaggcccgatcacgccttatatagtacaactatgcaagccacacccaacgcatcgcatattagtgcttttaaccttcgcatagtttccccgtcggcatatcgtgtttgtcctctccaaaatgacacagatacctacttaggtattccagcagacgtggcggcagttcttccagtagacgtggtgactgatcctaacatcttgctgggcatgcagacaacggtacacattgcggagctagtcaaggcatgtcatccgtcacccgatgttgtgagcgctgtaggggagcacctgaactggctcaacaaactcttactcccacttaaggaatcgactcagttgcaaggaagcgagtcgtacaaggagtgccttgcactcttgggtcgtgttcacgctgcgatgaagatggtgagaattggcttagtagtgccccagctgcaatacagaatgtacggtagcctcatcaaccaaatggcccaagtagcacaaaactacgaccgagaattcaagcaattcaaattattcatcatccaaaatcaaatccttggcagctatttgctgcagcagaacagggcatttgctgagagggagctgcagatggagagctttcatgctgctgtcatttctcaaagaagggaggagttggacaatacattcgcaaagatggaccgattgagcgggcaaatggaggcagagagtagtgcaatggagcaagccaaaaaggaaatggacgaaggattgaggcagttccagaataggcaagttgcgaacgccctctttgccgttcttagcgctgtagctcagattgggcttgcattccttacggctggtgcaacggctcctggagctgtggcgtcggcggggcaagctgtgagcatagcaggtcaggcggcgcaaggtctgcgaagggtggtggaaattctagagcagctggaggctgtgatggaggttgtggctgctgtgaaggacctcgtggattcattggaacaggtaggtcagattgtggacgcaccggtgatgccggaattgccctcagaggcggactggtccatttttgtgaacgaggtggaggccgtggcagagggcatgccaacggaagtctcggaggttccggtgtggagggccaagtgcaagaatgtggctgcactgggtcgggagatgagcatcacggcagtacagatgtcggagctgcagtatgacatctgggtgcaaggcatgatgcgggatatggctcgaagccaggcagacaggctggccgcaattcaacccgcggaccttaccaactatttggagatggctacccagatggatatgcggactacgaggatgctgctggggctcctcaacatattgcgcatccagaatgcggcgctcaggtacgagtatcttctaatgcccacggagctcacaacatggccactgggtatggataccgtgggtgacttgctcatcgcgcaggagaatgctgcactgataggattaatgcagctagggccctcatctgatttcacgagcaggcatgtggtgaaagacatacctgtgaacttgctgctcgatggcgaggattgggagtttgagattcctgtgcaagctggcatgtccagcttcccttccagctggtctcgcgtccgtattcggcacctggagatgcactttgtgaaggaggccagcggtattggtggtgagattatccaccagcctaccacccagactgggaccgtttacatccttctgcagggttccactatcttccatgaccgcagaagagaccaggtgttgccttttcaggccgctgctccgctcaactaccattacgcgtaccgcctcgacaccggcgactccactctcacaaacgaaccctctgaacagtttgccaacaagttcatgcagatgacacccttcactcgttggcgcctccgcctttcggcctccgcgcccgagaacaagggcctcgcatttccaaccgccaccttggccgatgccaccacacgaatcaaaatcacctttcacgtctctgccattcgccgtataagcaccagagtcgccgta

SEQ ID NO: 639 - DNA, 2601 bp, synthetic construct
  misc_feature 1..2601: note = Synthetic
  source 1..2601: mol_type = other DNA
atggctctcgtggattacggcaagcttttcgaggatctgaaccagataagcatgggtgtactggatcgggtagagttttcagaggtgatggtgatccacaggatgtatgtgaggctagctgatctgaatgtggggcagctcgagggagccgagaaagtgaagcggttgtatgtgtttgcggacgtggtggagctaccagtcgtggaatggcggtggccgccgcaaataccaggatcggtgacggtgatcatattgtgtcgtcttcttcaatggccaactgatgggaggcagtcggacaccgagctccacctgacattcatgaagttgcatgccatacaacgagaggaaaatcggtgggagataaccgcagcagatggcatgaactggggagtttacatacacgcagaggaagtacaggttggcgtgctgacaatgtcatggtcttcggtacttagagtttcggcacttcgctctgttataacctccggctttcgcgccgttagtgtgtttgaggtaccgggaagtgtaaggtccacccttggagctactttaaggcccgatcacgccttatatagtacaactatgcaagccacacccaacgcatcgcatattagtgcttttaaccttcgcatagtttccccgtcggcatatcgtgtttgtcctctccaaaatgacacagatacctacttaggtattccagcagacgtggcggcagttcttccagtagacgtggtgactgatcctaacatcttgctgggcatgcagacaacggtacacattgcggagctagtcaaggcatgtcatccgtcacccgatgttgtgagcgctgtaggggagcacctgaactggctcaacaaactcttactcccacttaaggaatcgactcagttgcaaggaagcgagtcgtacaaggagtgccttgcactcttgggtcgtgttcacgctgcgatgaagatggtgagaattggcttagtagtgccccagctgcaatatcgcatgtacaaagatctcattgatcgaatggtgcaagtggctcagagctacgaccaagacttcaagcagttgaagctgttcgtggaacaaaataagatacttgggagctatttgctagagcaaaacaaggcgtttgctgagaaggaaaaagacatggatgcttttcactcccaagtcattgatctcaggacttctgagcttgaaagcaccattgagagaatggatgacttaagcaaacaaatggaagaacaaaatgcagcaatggagcaagccaaagcggacatggacgcagggttgatagcgtatcaaaacaaacaagtcgcaaatgccgtctttgcggtcttgggggcgatcgccagtattggtctggcatttgcaactggcggggcaactgctcctggagccgtggcttccgcaggagcagctgttaccgcagctgggaaggcagctgagggattgaagaaagtggtagagattcttgaaggcttacaagcggtgatggaggtcgtcgctgtcataaaagagctggtacagtccttacaggagatagggcagcttgtggatgcccctgagatgccagatctgccgtcggatgcagaatgggagatttttgtgaatgaagtggaggcagtagcagagcagatgccaacagaggtgacagaggtgcctgcttggaaggccaagtgcaagaatgtggcagcactaggccgagaaatgagcactatggcggcgcacattgcagagttgcagttcgagatacaagtgcaagaaatgttgcgcgagatcgcgaagaaacaggcagataggctgtcgtccatcaagcccgcagacttgacgaactacttggagatggtgtccgaaatggacatgcgcacaacgcgcatgctgttggagctgattcgagtgctgtacatccagaacgcagcattgcagtacgaatatctgcagacaccggcgccattgaatgcatggccagtgacgatgcaaacggtgtgggggttgcttgtgcaacaagagacggccgcaattaacgggctgctgcagatgggggcgccctcggactacacacaagagtatgcggtgagagatgttcctgtgaggttgttactagggggtggagactgggagtttgagattcctgtgcaagctggcatgtccagcttcccttccagctggtctcgcgtccgtattcggcacctggagatgcactttgtgaaggaggccagcggtattggtggtgagattatccaccagcctaccacccagactgggaccgtttacatccttctgcagggttccactatcttccatgaccgcagaagagaccaggtgttgccttttcaggccgctgctccgctcaactaccattacgcgtaccgcctcgacaccggcgactccactctcacaaacgaaccctctgaacagtttgccaacaagttcatgcagatgacacccttcacccgttggaggcttcgtctgtctgcgtccgcaaaagagaatgcaggattagcctttcccacggctacagcacttgactccactacccagattgtcatcactttccatgttacggccatcagacaaattgactggcggcacgacgaagag

SEQ ID NO: 640 - protein, 867 aa, synthetic construct
  REGION 1..867: note = Synthetic
MALVDYGKLFEDLNQISMGVLDRVEFSEVMVIHRMYVRLADLNVGQLEGAEKVKRLYVFADVVELPVVEWRWPPQIPGSVTVIILCRLLQWPTDGRQSDTELHLTFMKLHAIQREENRWEITAADGMNWGVYIHAEEVQVGVLTMSWSSVLRVSALRSVITSGFRAVSVFEVPGSVRSTLGATLRPDHALYSTTMQATPNASHISAFNLRIVSPSAYRVCPLQNDTDTYLGIPADVAAVLPVDVVTDPNILLGMQTTVHIAELVKACHPSPDVVSAVGEHLNWLNKLLLPLKESTQLQGSESYKECLALLGRVHAAMKMVRIGLVVPQLQYRMYKDLIDRMVQVAQSYDQDFKQLKLFVEQNKILGSYLLEQNKAFAEKEKDMDAFHSQVIDLRTSELESTIERMDDLSKQMEEQNAAMEQAKADMDAGLIAYQNKQVANAVFAVLGAIASIGLAFATGGATAPGAVASAGQAVSIAGQAAQGLRRVVEILEQLEAVMEVVAAVKDLVDSLEQVGQIVDAPVMPELPSEADWSIFVNEVEAVAEGMPTEVSEVPVWRAKCKNVAALGREMSITAVQMSELQYDIWVQGMMRDMARSQADRLAAIQPADLTNYLEMATQMDMRTTRMLLGLLNILRIQNAALRYEYLLMPTELTTWPLGMDTVGDLLIAQENAALIGLMQLGPSSDFTSRHVVKDIPVNLLLDGEDWEFEIPVQAGMSSFPSSWSRVRIRHLEMHFVKEASGIGGEIIHQPTTQTGTVYILLQGSTIFHDRRRDQVLPFQAAAPLNYHYAYRLDTGDSTLTNEPSEQFANKFMQMTPFTRWRLRLSASAKENAGLAFPTATALDSTTQIVITFHVTAIRQIDWRHDEE

SEQ ID NO: 641 - protein, 867 aa, synthetic construct
  REGION 1..867: note = Synthetic
MALVDYGKLFEDLNQISMGVLDRVEFSEVMVIHRMYVRLADLNVGQLEGAEKVKRLYVFADVVELPVVEWRWPPQIPGSVTVIILCRLLQWPTDGRQSDTELHLTFMKLHAIQREENRWEITAADGMNWGVYIHAEEVQVGVLTMSWSSVLRVSALRSVITSGFRAVSVFEVPGSVRSTLGATLRPDHALYSTTMQATPNASHISAFNLRIVSPSAYRVCPLQNDTDTYLGIPADVAAVLPVDVVTDPNILLGMQTTVHIAELVKACHPSPDVVSAVGEHLNWLNKLLLPLKESTQLQGSESYKECLALLGRVHAAMKMVRIGLVVPQLQYRMYGSLINQMAQVAQNYDREFKQFKLFIIQNQILGSYLLQQNRAFAERELQMESFHAAVISQRREELDNTFAKMDRLSGQMEAESSAMEQAKKEMDEGLRQFQNRQVANALFAVLSAVAQIGLAFLTAGATAPGAVASAGAAVTAAGKAAEGLKKVVEILEGLQAVMEVVAVIKELVQSLQEIGQLVDAPEMPDLPSDAEWEIFVNEVEAVAEQMPTEVTEVPAWKAKCKNVAALGREMSTMAAHIAELQFEIQVQEMLREIAKKQADRLSSIKPADLTNYLEMATQMDMRTTRMLLGLLNILRIQNAALRYEYLLMPTELTTWPLGMDTVGDLLIAQENAALIGLMQLGPSSDFTSRHVVKDIPVNLLLDGEDWEFEIPVQAGMSSFPSSWSRVRIRHLEMHFVKEASGIGGEIIHQPTTQTGTVYILLQGSTIFHDRRRDQVLPFQAAAPLNYHYAYRLDTGDSTLTNEPSEQFANKFMQMTPFTRWRLRLSASAKENAGLAFPTATALDSTTQIVITFHVTAIRQIDWRHDEE

SEQ ID NO: 642 - protein, 867 aa, synthetic construct
  REGION 1..867: note = Synthetic
MALVDYGKLFEDLNQISMGVLDRVEFSEVMVIHRMYVRLADLNVGQLEGAEKVKRLYVFADVVELPVVEWRWPPQIPGSVTVIILCRLLQWPTDGRQSDTELHLTFMKLHAIQREENRWEITAADGMNWGVYIHAEEVQVGVLTMSWSSVLRVSALRSVITSGFRAVSVFEVPGSVRSTLGATLRPDHALYSTTMQATPNASHISAFNLRIVSPSAYRVCPLQNDTDTYLGIPADVAAVLPVDVVTDPNILLGMQTTVHIAELVKACHPSPDVVSAVGEHLNWLNKLLLPLKESTQLQGSESYKECLALLGRVHAAMKMVRIGLVVPQLQYRMYGSLINQMAQVAQNYDREFKQFKLFIIQNQILGSYLLQQNRAFAERELQMESFHAAVISQRREELDNTFAKMDRLSGQMEAESSAMEQAKKEMDEGLRQFQNRQVANALFAVLSAVAQIGLAFLTAGATAPGAVASAGQAVSIAGQAAQGLRRVVEILEQLEAVMEVVAAVKDLVDSLEQVGQIVDAPVMPELPSEADWSIFVNEVEAVAEGMPTEVSEVPVWRAKCKNVAALGREMSITAVQMSELQYDIWVQGMMRDMARSQADRLAAIQPADLTNYLEMVSEMDMRTTRMLLELIRVLYIQNAALQYEYLQTPAPLNAWPVTMQTVWGLLVQQETAAINGLLQMGAPSDYTQEYAVRDVPVRLLLGGGDWEFEIPVQAGMSSFPSSWSRVRIRHLEMHFVKEASGIGGEIIHQPTTQTGTVYILLQGSTIFHDRRRDQVLPFQAAAPLNYHYAYRLDTGDSTLTNEPSEQFANKFMQMTPFTRWRLRLSASAKENAGLAFPTATALDSTTQIVITFHVTAIRQIDWRHDEE

SEQ ID NO: 643 - protein, 868 aa, synthetic construct
  REGION 1..868: note = Synthetic
MALVDYGKLFEDLNQISMGVLDRVEFSEVMVIHRMYVRLADLNVGQLEGAEKVKRLYVFADVVELPVVEWRWPPQIPGSVTVIILCRLLQWPTDGRQSDTELHLTFMKLHAIQREENRWEITAADGMNWGVYIHAEEVQVGVLTMSWSSVLRVSALRSVITSGFRAVSVFEVPGSVRSTLGATLRPDHALYSTTMQATPNASHISAFNLRIVSPSAYRVCPLQNDTDTYLGIPADVAAVLPVDVVTDPNILLGMQTTVHIAELVKACHPSPDVVSAVGEHLNWLNKLLLPLKESTQLQGSESYKECLALLGRVHAAMKMVRIGLVVPQLQYRMYGSLINQMAQVAQNYDREFKQFKLFIIQNQILGSYLLQQNRAFAERELQMESFHAAVISQRREELDNTFAKMDRLSGQMEAESSAMEQAKKEMDEGLRQFQNRQVANALFAVLSAVAQIGLAFLTAGATAPGAVASAGQAVSIAGQAAQGLRRVVEILEQLEAVMEVVAAVKDLVDSLEQVGQIVDAPVMPELPSEADWSIFVNEVEAVAEGMPTEVSEVPVWRAKCKNVAALGREMSITAVQMSELQYDIWVQGMMRDMARSQADRLAAIQPADLTNYLEMATQMDMRTTRMLLGLLNILRIQNAALRYEYLLMPTELTTWPLGMDTVGDLLIAQENAALIGLMQLGPSSDFTSRHVVKDIPVNLLLDGEDWEFEIPVQAGMSSFPSSWSRVRIRHLEMHFVKEASGIGGEIIHQPVTSTGEVYMLLQSSRFFEDRAKRENEFISYEGGMGLQYQYAYRLATGDATVTNVPSEEYANTFMRLAPFTRWRLRLSASAPENKGLAFPTATLADATTRIKITFHVSAIRRISTRVAV

SEQ ID NO: 644 - protein, 866 aa, synthetic construct
  REGION 1..866: note = Synthetic
MALVDYGKLFEDLNQISMGVLDRVEFSEVMVIHRMYVRLADLNVGQLEGAEKVKRLYVFADVVELPVVEWRWPPQIPGSVTVIILCRLLQWPTDGRQSDTELHLTFMKLHAIQREENRWEITAADGMNWGVYIHAEEVQVGVLTMSWSSVLRVSALRSVITSGFRAVSVFEVPGSVRSTLGATLRPDHALYSTTMQATPNASHISAFNLRIVSPSAYRVCPLQNDTDTYLGIPADVAAVLPVDVVTDPNILLGMQTTVHIAELVKACHPSPDVVSAVGEHLNWLNKLLLPLKESTQLQGSESYKECLALLGRVHAAMKMVRIGLVVPQLQYRMYGSLINQMAQVAQNYDREFKQFKLFIIQNQILGSYLLQQNRAFAERELQMESFHAAVISQRREELDNTFAKMDRLSGQMEAESSAMEQAKKEMDEGLRQFQNRQVANALFAVLSAVAQIGLAFLTAGATAPGAVASAGQAVSIAGQAAQGLRRVVEILEQLEAVMEVVAAVKDLVDSLEQVGQIVDAPVMPELPSEADWSIFVNEVEAVAEGMPTEVSEVPVWRAKCKNVAALGREMSITAVQMSELQYDIWVQGMMRDMARSQADRLAAIQPADLTNYLEMATQMDMRTTRMLLGLLNILRIQNAALRYEYLLMPTELTTWPLGMDTVGDLLIAQENAALIGLMQLGPSSDFTSRHVVKDIPVNLLLDGEDWEFEIPVQAGMSSFPSSWSRVRIRHLEMHFVKEASGIGGEIIHQPTTQTGTVYILLQGSTIFHDRRRDQVLPFQAAAPLNYHYAYRLDTGDSTLTNEPSEQFANKFMQMTPFTRWRLRLSASAPENKGLAFPTATLADATTRIKITFHVSAIRRISTRVAV

SEQ ID NO: 645 - protein, 867 aa, synthetic construct
  REGION 1..867: note = Synthetic
MALVDYGKLFEDLNQISMGVLDRVEFSEVMVIHRMYVRLADLNVGQLEGAEKVKRLYVFADVVELPVVEWRWPPQIPGSVTVIILCRLLQWPTDGRQSDTELHLTFMKLHAIQREENRWEITAADGMNWGVYIHAEEVQVGVLTMSWSSVLRVSALRSVITSGFRAVSVFEVPGSVRSTLGATLRPDHALYSTTMQATPNASHISAFNLRIVSPSAYRVCPLQNDTDTYLGIPADVAAVLPVDVVTDPNILLGMQTTVHIAELVKACHPSPDVVSAVGEHLNWLNKLLLPLKESTQLQGSESYKECLALLGRVHAAMKMVRIGLVVPQLQYRMYKDLIDRMVQVAQSYDQDFKQLKLFVEQNKILGSYLLEQNKAFAEKEKDMDAFHSQVIDLRTSELESTIERMDDLSKQMEEQNAAMEQAKADMDAGLIAYQNKQVANAVFAVLGAIASIGLAFATGGATAPGAVASAGAAVTAAGKAAEGLKKVVEILEGLQAVMEVVAVIKELVQSLQEIGQLVDAPEMPDLPSDAEWEIFVNEVEAVAEQMPTEVTEVPAWKAKCKNVAALGREMSTMAAHIAELQFEIQVQEMLREIAKKQADRLSSIKPADLTNYLEMVSEMDMRTTRMLLELIRVLYIQNAALQYEYLQTPAPLNAWPVTMQTVWGLLVQQETAAINGLLQMGAPSDYTQEYAVRDVPVRLLLGGGDWEFEIPVQAGMSSFPSSWSRVRIRHLEMHFVKEASGIGGEIIHQPTTQTGTVYILLQGSTIFHDRRRDQVLPFQAAAPLNYHYAYRLDTGDSTLTNEPSEQFANKFMQMTPFTRWRLRLSASAKENAGLAFPTATALDSTTQIVITFHVTAIRQIDWRHDEE

SEQ ID NO: 646 - protein, 50 aa, synthetic construct
  REGION 1..50: note = Synthetic
  SITE 3: note = misc_feature - Xaa can be any naturally occurring amino acid
  SITE 17: note = misc_feature - Xaa can be any naturally occurring amino acid
  SITE 33: note = misc_feature - Xaa can be any naturally occurring amino acid
  SITE 41: note = misc_feature - Xaa can be any naturally occurring amino acid
  SITE 49: note = misc_feature - Xaa can be any naturally occurring amino acid
MPXMPSEADWSIFVNEXEAVAEGMPTEVSEVPXWKAKCKNXAALGREMXI

SEQ ID NO: 647 - protein, 50 aa, synthetic construct
  REGION 1..50: note = Synthetic
  SITE 10: note = misc_feature - Xaa can be any naturally occurring amino acid
  SITE 13: note = misc_feature - Xaa can be any naturally occurring amino acid
  SITE 25: note = misc_feature - Xaa can be any naturally occurring amino acid
  SITE 29: note = misc_feature - Xaa can be any naturally occurring amino acid
  SITE 34: note = misc_feature - Xaa can be any naturally occurring amino acid
  SITE 39: note = misc_feature - Xaa can be any naturally occurring amino acid
  SITE 48: note = misc_feature - Xaa can be any naturally occurring amino acid
PQLQYRMYGXLIXQMAQVAQNYDQXFKQXKLFIXQNQIXGSYLLQQNXAF

SEQ ID NO: 648 - protein, 50 aa, synthetic construct
  REGION 1..50: note = Synthetic
  SITE 25: note = misc_feature - Xaa can be any naturally occurring amino acid
  SITE 34: note = misc_feature - Xaa can be any naturally occurring amino acid
  REGION 39..40: note = misc_feature - Xaa can be any naturally occurring amino acid
NTFMQMTPFTRWRLRLSASASENAXLAFPTATAXDSTTXXVITFHVTAIR

SEQ ID NO: 649 - protein, 36 aa, synthetic construct
  REGION 1..36: note = Synthetic
  SITE 1: note = misc_feature - Xaa can be any naturally occurring amino acid
  SITE 10: note = misc_feature - Xaa can be any naturally occurring amino acid
  SITE 30: note = misc_feature - Xaa can be any naturally occurring amino acid
XFTSRHVVKXIPVSLLLDGEDWEFEIPVQXGMSSFP

SEQ ID NO: 650 - protein, 50 aa, synthetic construct
  REGION 1..50: note = Synthetic
  SITE 6: note = misc_feature - Xaa can be any naturally occurring amino acid
  REGION 8..9: note = misc_feature - Xaa can be any naturally occurring amino acid
  SITE 11: note = misc_feature - Xaa can be any naturally occurring amino acid
  SITE 28: note = misc_feature - Xaa can be any naturally occurring amino acid
  SITE 37: note = misc_feature - Xaa can be any naturally occurring amino acid
  REGION 41..42: note = misc_feature - Xaa can be any naturally occurring amino acid
IIHQPXTXXGXVYILLQGSTIFHDRRRXEVMTFQAAXPLNXXYAYRLDTG

SEQ ID NO: 651 - protein, 50 aa, synthetic construct
  REGION 1..50: note = Synthetic
  SITE 2: note = misc_feature - Xaa can be any naturally occurring amino acid
  SITE 12: note = misc_feature - Xaa can be any naturally occurring amino acid
  SITE 17: note = misc_feature - Xaa can be any naturally occurring amino acid
  SITE 23: note = misc_feature - Xaa can be any naturally occurring amino acid
  REGION 30..31: note = misc_feature - Xaa can be any naturally occurring amino acid
  SITE 33: note = misc_feature - Xaa can be any naturally occurring amino acid
  SITE 38: note = misc_feature - Xaa can be any naturally occurring amino acid
SXADRLAAIQPXDLTNXLEMATXMDMRTTXXLXGLLNXLRIQNAALMYEY

SEQ ID NO: 652 - protein, 44 aa, synthetic construct
  REGION 1..44: note = Synthetic
  SITE 1: note = misc_feature - Xaa can be any naturally occurring amino acid
  SITE 20: note = misc_feature - Xaa can be any naturally occurring amino acid
  SITE 23: note = misc_feature - Xaa can be any naturally occurring amino acid
  SITE 28: note = misc_feature - Xaa can be any naturally occurring amino acid
  REGION 31..32: note = misc_feature - Xaa can be any naturally occurring amino acid
  SITE 36: note = misc_feature - Xaa can be any naturally occurring amino acid
  SITE 39: note = misc_feature - Xaa can be any naturally occurring amino acid
XDRVEFSEVMVIHRMYVRLXDLXVGELXGAXXVKRXYVXADVVE

SEQ ID NO: 653 - protein, 50 aa, synthetic construct
  REGION 1..50: note = Synthetic
  SITE 2: note = misc_feature - Xaa can be any naturally occurring amino acid
  SITE 23: note = misc_feature - Xaa can be any naturally occurring amino acid
  SITE 26: note = misc_feature - Xaa can be any naturally occurring amino acid
  SITE 30: note = misc_feature - Xaa can be any naturally occurring amino acid
  SITE 32: note = misc_feature - Xaa can be any naturally occurring amino acid
  SITE 40: note = misc_feature - Xaa can be any naturally occurring amino acid
AXRELQMESFHSAVISQRRQELXTAXAKMXRXSLQMEEEXRAMEQAQKEM

SEQ ID NO: 654 - protein, 50 aa, synthetic construct
  REGION 1..50: note = Synthetic
  SITE 12: note = misc_feature - Xaa can be any naturally occurring amino acid
  SITE 28: note = misc_feature - Xaa can be any naturally occurring amino acid
  SITE 38: note = misc_feature - Xaa can be any naturally occurring amino acid
  SITE 49: note = misc_feature - Xaa can be any naturally occurring amino acid
FVTAGATAPGAXASAGQAVSIAGQAAQXLRRVVEILEXLEAVMEVVAAXK

SEQ ID NO: 655 - protein, 50 aa, synthetic construct
  REGION 1..50: note = Synthetic
  SITE 7: note = misc_feature - Xaa can be any naturally occurring amino acid
  SITE 10: note = misc_feature - Xaa can be any naturally occurring amino acid
  SITE 13: note = misc_feature - Xaa can be any naturally occurring amino acid
  SITE 15: note = misc_feature - Xaa can be any naturally occurring amino acid
  SITE 34: note = misc_feature - Xaa can be any naturally occurring amino acid
  SITE 43: note = misc_feature - Xaa can be any naturally occurring amino acid
  SITE 49: note = misc_feature - Xaa can be any naturally occurring amino acid
DGMNWGXYIXGEXVXRSPLLPSNAILAVWADRCXITSARHNHXNAPGRXI

SEQ ID NO: 656 - protein, 50 aa, synthetic construct
  REGION 1..50: note = Synthetic
  REGION 1..3: note = misc_feature - Xaa can be any naturally occurring amino acid
  SITE 11: note = misc_feature - Xaa can be any naturally occurring amino acid
  SITE 31: note = misc_feature - Xaa can be any naturally occurring amino acid
  SITE 35: note = misc_feature - Xaa can be any naturally occurring amino acid
  SITE 39: note = misc_feature - Xaa can be any naturally occurring amino acid
XXXRPPSPDMXSAVAEHALWLNDVLLQVVQXESQXQGTXPYNECLALLGR

SEQ ID NO: 657 - protein, 36 aa, synthetic construct
  REGION 1..36: note = Synthetic
  SITE 6: note = misc_feature - Xaa can be any naturally occurring amino acid
  SITE 15: note = misc_feature - Xaa can be any naturally occurring amino acid
  SITE 27: note = misc_feature - Xaa can be any naturally occurring amino acid
PTELTXWPLGMDTVXNLLIAQENAALXGLIQLGPSS

SEQ ID NO: 658 - protein, 30 aa, synthetic construct
  REGION 1..30: note = Synthetic
  REGION 4..5: note = misc_feature - Xaa can be any naturally occurring amino acid
  SITE 14: note = misc_feature - Xaa can be any naturally occurring amino acid
  SITE 23: note = misc_feature - Xaa can be any naturally occurring amino acid
  SITE 29: note = misc_feature - Xaa can be any naturally occurring amino acid
RDQXXMPGSVTVIXLCRLLQFPXDGSQAXT

SEQ ID NO: 659 - protein, 26 aa, synthetic construct
  REGION 1..26: note = Synthetic
  SITE 12: note = misc_feature - Xaa can be any naturally occurring amino acid
  SITE 22: note = misc_feature - Xaa can be any naturally occurring amino acid
TSIPVEVVTDPXILLGMQTTVXIAEL

SEQ ID NO: 660 - protein, 26 aa, synthetic construct
  REGION 1..26: note = Synthetic
  SITE 5: note = misc_feature - Xaa can be any naturally occurring amino acid
  SITE 15: note = misc_feature - Xaa can be any naturally occurring amino acid
  SITE 24: note = misc_feature - Xaa can be any naturally occurring amino acid
  SITE 26: note = misc_feature - Xaa can be any naturally occurring amino acid
EGLRXFQNRQVARAXFAVLKAVAXIX

SEQ ID NO: 661 - protein, 19 aa, synthetic construct
  REGION 1..19: note = Synthetic
  SITE 2: note = misc_feature - Xaa can be any naturally occurring amino acid
  SITE 12: note = misc_feature - Xaa can be any naturally occurring amino acid
  SITE 14: note = misc_feature - Xaa can be any naturally occurring amino acid
WXRVRIRHLEMXFXQEASG

SEQ ID NO: 662 - protein, 19 aa, synthetic construct
  REGION 1..19: note = Synthetic
  SITE 8: note = misc_feature - Xaa can be any naturally occurring amino acid
  REGION 14..15: note = misc_feature - Xaa can be any naturally occurring amino acid
QISELQYXIWVQGXXRDIA

SEQ ID NO: 663 - protein, 36 aa, synthetic construct
  REGION 1..36: note = Synthetic
TFTLGSGVTGITSMHGEPSLDPWNGVSLDSASPTAF

SEQ ID NO: 664 - protein, 14 aa, synthetic construct
  REGION 1..14: note = Synthetic
MDYSTLYRDLNQIS

SEQ ID NO: 665 - protein, 19 aa, synthetic construct
  REGION 1..19: note = Synthetic
  SITE 7: note = misc_feature - Xaa can be any naturally occurring amino acid
  SITE 17: note = misc_feature - Xaa can be any naturally occurring amino acid
  SITE 19: note = misc_feature - Xaa can be any naturally occurring amino acid
LRLPFMXLHARVIEQNXKX

SEQ ID NO: 666 - protein, 14 aa, synthetic construct
  REGION 1..14: note = Synthetic
  REGION 9..10: note = misc_feature - Xaa can be any naturally occurring amino acid
  SITE 12: note = misc_feature - Xaa can be any naturally occurring amino acid
VDSLEQVGXXVXAP

SEQ ID NO: 667 - protein, 14 aa, synthetic construct
  REGION 1..14: note = Synthetic
  REGION 1..3: note = misc_feature - Xaa can be any naturally occurring amino acid
  SITE 7: note = misc_feature - Xaa can be any naturally occurring amino acid
  REGION 11..12: note = misc_feature - Xaa can be any naturally occurring amino acid
XXXVMKXGRFXXVV

SEQ ID NO: 668 - protein, 10 aa, synthetic construct
  REGION 1..10: note = Synthetic
  SITE 9: note = misc_feature - Xaa can be any naturally occurring amino acid
TLTNEPSEXF

SEQ ID NO: 669 - protein, 10 aa, synthetic construct
  REGION 1..10: note = Synthetic
LPRQSRNISF

SEQ ID NO: 670 - protein, 50 aa, synthetic construct
  REGION 1..50: note = Synthetic
  SITE 3: note = misc_feature - Xaa can be any naturally occurring amino acid
  REGION 6..7: note = misc_feature - Xaa can be any naturally occurring amino acid
  SITE 17: note = misc_feature - Xaa can be any naturally occurring amino acid
  SITE 33: note = misc_feature - Xaa can be any naturally occurring amino acid
  SITE 35: note = misc_feature - Xaa can be any naturally occurring amino acid
  SITE 41: note = misc_feature - Xaa can be any naturally occurring amino acid
  SITE 49: note = misc_feature - Xaa can be any naturally occurring amino acid
MPXMPXXADWSIFVNEXEAVAEGMPTEVSEVPXWXAKCKNXAALGREMXI

SEQ ID NO: 671 - protein, 50 aa, synthetic construct
  REGION 1..50: note = Synthetic
  SITE 10: note = misc_feature - Xaa can be any naturally occurring amino acid
  SITE 13: note = misc_feature - Xaa can be any naturally occurring amino acid
  REGION 24..25: note = misc_feature - Xaa can be any naturally occurring amino acid
  REGION 28..30: note = misc_feature - Xaa can be any naturally occurring amino acid
  SITE 34: note = misc_feature - Xaa can be any naturally occurring amino acid
  SITE 39: note = misc_feature - Xaa can be any naturally occurring amino acid
  SITE 45: note = misc_feature - Xaa can be any naturally occurring amino acid
  SITE 48: note = misc_feature - Xaa can be any naturally occurring amino acid
PQLQYRMYGXLIXQMAQVAQNYDXXFKXXXLFIXQNQIXGSYLLXQNXAF

SEQ ID NO: 672 - protein, 50 aa, synthetic construct
  REGION 1..50: note = Synthetic
  SITE 2: note = misc_feature - Xaa can be any naturally occurring amino acid
  SITE 11: note = misc_feature - Xaa can be any naturally occurring amino acid
  SITE 21: note = misc_feature - Xaa can be any naturally occurring amino acid
  REGION 24..25: note = misc_feature - Xaa can be any naturally occurring amino acid
  SITE 34: note = misc_feature - Xaa can be any naturally occurring amino acid
  REGION 39..41: note = misc_feature - Xaa can be any naturally occurring amino acid
NXFMQMTPFTXWRLRLSASAXENXXLAFPTATAXDSTTXXXITFHVTAIR

SEQ ID NO: 673 - protein, 36 aa, synthetic construct
  REGION 1..36: note = Synthetic
  SITE 1: note = misc_feature - Xaa can be any naturally occurring amino acid
  SITE 10: note = misc_feature - Xaa can be any naturally occurring amino acid
  SITE 14: note = misc_feature - Xaa can be any naturally occurring amino acid
  SITE 20: note = misc_feature - Xaa can be any naturally occurring amino acid
  SITE 30: note = misc_feature - Xaa can be any naturally occurring amino acid
XFTSRHVVKXIPVXLLLDGXDWEFEIPVQXGMSSFP

SEQ ID NO: 674 - protein, 50 aa, synthetic construct
  REGION 1..50: note = Synthetic
  SITE 6: note = misc_feature - Xaa can be any naturally occurring amino acid
  REGION 8..9: note = misc_feature - Xaa can be any naturally occurring amino acid
  REGION 11..12: note = misc_feature - Xaa can be any naturally occurring amino acid
  SITE 21: note = misc_feature - Xaa can be any naturally occurring amino acid
  REGION 28..29: note = misc_feature - Xaa can be any naturally occurring amino acid
  SITE 31: note = misc_feature - Xaa can be any naturally occurring amino acid
  SITE 33: note = misc_feature - Xaa can be any naturally occurring amino acid
  SITE 37: note = misc_feature - Xaa can be any naturally occurring amino acid
  REGION 41..42: note = misc_feature - Xaa can be any naturally occurring amino acid
IIHQPXTXXGXXYILLQGSTXFHDRRRXXVXTXQAAXPLNXXYAYRLDTG

SEQ ID NO: 675 - protein, 50 aa, synthetic construct
  REGION 1..50: note = Synthetic
  SITE 2: note = misc_feature - Xaa can be any naturally occurring amino acid
  REGION 12..13: note = misc_feature - Xaa can be any naturally occurring amino acid
  SITE 17: note = misc_feature - Xaa can be any naturally occurring amino acid
  SITE 23: note = misc_feature - Xaa can be any naturally occurring amino acid
  REGION 30..31: note = misc_feature - Xaa can be any naturally occurring amino acid
  SITE 33: note = misc_feature - Xaa can be any naturally occurring amino acid
  REGION 38..39: note = misc_feature - Xaa can be any naturally occurring amino acid
  SITE 47: note = misc_feature - Xaa can be any naturally occurring amino acid
SXADRLAAIQPXXLTNXLEMATXMDMRTTXXLXGLLNXXRIQNAALXYEY

SEQ ID NO: 676 - protein, 45 aa, synthetic construct
  REGION 1..45: note = Synthetic
  SITE 1: note = misc_feature - Xaa can be any naturally occurring amino acid
  SITE 3: note = misc_feature - Xaa can be any naturally occurring amino acid
  SITE 21: note = misc_feature - Xaa can be any naturally occurring amino acid
  SITE 24: note = misc_feature - Xaa can be any naturally occurring amino acid
  REGION 26..27: note = misc_feature - Xaa can be any naturally occurring amino acid
  SITE 29: note = misc_feature - Xaa can be any naturally occurring amino acid
  REGION 32..33: note = misc_feature - Xaa can be any naturally occurring amino acid
  SITE 37: note = misc_feature - Xaa can be any naturally occurring amino acid
  SITE 40: note = misc_feature - Xaa can be any naturally occurring amino acid
XDXVEFSEVMVIHRMYVNRLXDLXVXXLXGAXXVKRXYVXADVVE

SEQ ID NO: 677 - protein, 50 aa, synthetic construct
  REGION 1..50: note = Synthetic
  SITE 2: note = misc_feature - Xaa can be any naturally occurring amino acid
  SITE 12: note = misc_feature - Xaa can be any naturally occurring amino acid
  SITE 18: note = misc_feature - Xaa can be any naturally occurring amino acid
  SITE 20: note = misc_feature - Xaa can be any naturally occurring amino acid
  REGION 23..26: note = misc_feature - Xaa can be any naturally occurring amino acid
  SITE 30: note = misc_feature - Xaa can be any naturally occurring amino acid
  SITE 32: note = misc_feature - Xaa can be any naturally occurring amino acid
  REGION 40..41: note = misc_feature - Xaa can be any naturally occurring amino acid
  SITE 47: note = misc_feature - Xaa can be any naturally occurring amino acid
AXRELQMESFHXAVISQXRXELXXXXAKMXRXSLQMEEEXXAMEQAXKEM

SEQ ID NO: 678 - protein, 50 aa, synthetic construct
  REGION 1..50: note = Synthetic
  SITE 2: note = misc_feature - Xaa can be any naturally occurring amino acid
  SITE 12: note = misc_feature - Xaa can be any naturally occurring amino acid
  SITE 20: note = misc_feature - Xaa can be any naturally occurring amino acid
  SITE 28: note = misc_feature - Xaa can be any naturally occurring amino acid
  SITE 38: note = misc_feature - Xaa can be any naturally occurring amino acid
  SITE 49: note = misc_feature - Xaa can be any naturally occurring amino acid
FXTAGATAPGAXASAGQAVXIAGQAAQXLRRVVEILEXLEAVMEVVAAXK

SEQ ID NO: 679 - protein, 50 aa, synthetic construct
  REGION 1..50: note = Synthetic
  REGION 2..4: note = misc_feature - Xaa can be any naturally occurring amino acid
  SITE 7: note = misc_feature - Xaa can be any naturally occurring amino acid
  REGION 9..11: note = misc_feature - Xaa can be any naturally occurring amino acid
  SITE 13: note = misc_feature - Xaa can be any naturally occurring amino acid
  REGION 15..16: note = misc_feature - Xaa can be any naturally occurring amino acid
  REGION 20..25: note = misc_feature - Xaa can be any naturally occurring amino acid
  SITE 27: note = misc_feature - Xaa can be any naturally occurring amino acid
  SITE 29: note = misc_feature - Xaa can be any naturally occurring amino acid
  SITE 31: note = misc_feature - Xaa can be any naturally occurring amino acid
  REGION 33..34: note = misc_feature - Xaa can be any naturally occurring amino acid
  SITE 37: note = misc_feature - Xaa can be any naturally occurring amino acid
  SITE 39: note = misc_feature - Xaa can be any naturally occurring amino acid
  REGION 42..45: note = misc_feature - Xaa can be any naturally occurring amino acid
  REGION 48..50: note = misc_feature - Xaa can be any naturally occurring amino acid
DXXXWGXYXXXEXVXXSPLXXXXXXLXVXAXRXXITXAXHNXXXXPGXXX

SEQ ID NO: 680 - protein, 50 aa, synthetic construct
  REGION 1..50: note = Synthetic
  REGION 1..5: note = misc_feature - Xaa can be any naturally occurring amino acid
  REGION 9..11: note = misc_feature - Xaa can be any naturally occurring amino acid
  REGION 15..16: note = misc_feature - Xaa can be any naturally occurring amino acid
  SITE 19: note = misc_feature - Xaa can be any naturally occurring amino acid
  REGION 22..23: note = misc_feature - Xaa can be any naturally occurring amino acid
  SITE 27: note = misc_feature - Xaa can be any naturally occurring amino acid
  SITE 31: note = misc_feature - Xaa can be any naturally occurring amino acid
  REGION 34..35: note = misc_feature - Xaa can be any naturally occurring amino acid
  REGION 39..40: note = misc_feature - Xaa can be any naturally occurring amino acid
XXXXXPSPXXXSAVXXHAXWLXXVLLXVVQXESXXQGTXXYNECLALLGR

SEQ ID NO: 681 - protein, 36 aa, synthetic construct
  REGION 1..36: note = Synthetic
  SITE 1: note = misc_feature - Xaa can be any naturally occurring amino acid
  SITE 3: note = misc_feature - Xaa can be any naturally occurring amino acid
  SITE 6: note = misc_feature - Xaa can be any naturally occurring amino acid
  SITE 10: note = misc_feature - Xaa can be any naturally occurring amino acid
  REGION 15..16: note = misc_feature - Xaa can be any naturally occurring amino acid
  REGION 20..21: note = misc_feature - Xaa can be any naturally occurring amino acid
  SITE 23: note = misc_feature - Xaa can be any naturally occurring amino acid
  SITE 27: note = misc_feature - Xaa can be any naturally occurring amino acid
  SITE 30: note = misc_feature - Xaa can be any naturally occurring amino acid
  REGION 34..35: note = misc_feature - Xaa can be any naturally occurring amino acid
XTXLTXWPLXMDTVXXLLIXXEXAALXGLXQLGXXS

SEQ ID NO: 682 - protein, 30 aa, synthetic construct
  REGION 1..30: note = Synthetic
  REGION 1..6: note = misc_feature - Xaa can be any naturally occurring amino acid
  SITE 14: note = misc_feature - Xaa can be any naturally occurring amino acid
  REGION 23..24: note = misc_feature - Xaa can be any naturally occurring amino acid
  REGION 26..30: note = misc_feature - Xaa can be any naturally occurring amino acid
XXXXXXPGSVTVIXLCRLLQFPXXGXXXXX

SEQ ID NO: 683 - protein, 26 aa, synthetic construct
  REGION 1..26: note = Synthetic
  REGION 1..3: note = misc_feature - Xaa can be any naturally occurring amino acid
  SITE 6: note = misc_feature - Xaa can be any naturally occurring amino acid
  SITE 12: note = misc_feature - Xaa can be any naturally occurring amino acid
  SITE 15: note = misc_feature - Xaa can be any naturally occurring amino acid
  SITE 20: note = misc_feature - Xaa can be any naturally occurring amino acid
  SITE 22: note = misc_feature - Xaa can be any naturally occurring amino acid
XXXPVXVVTDPXILXGMQTXVXIAEL

SEQ ID NO: 684 - protein, 26 aa, synthetic construct
  REGION 1..26: note = Synthetic
  SITE 5: note = misc_feature - Xaa can be any naturally occurring amino acid
  SITE 9: note = misc_feature - Xaa can be any naturally occurring amino acid
  SITE 13: note = misc_feature - Xaa can be any naturally occurring amino acid
  SITE 15: note = misc_feature - Xaa can be any naturally occurring amino acid
  REGION 20..21: note = misc_feature - Xaa can be any naturally occurring amino acid
  SITE 24: note = misc_feature - Xaa can be any naturally occurring amino acid
  SITE 26: note = misc_feature - Xaa can be any naturally occurring amino acid
EGLRXFQNXQVAXAXFAVLXXVAXIX

SEQ ID NO: 685 - protein, 19 aa, synthetic construct
  REGION 1..19: note = Synthetic
  SITE 2: note = misc_feature - Xaa can be any naturally occurring amino acid
  SITE 12: note = misc_feature - Xaa can be any naturally occurring amino acid
  REGION 14..15: note = misc_feature - Xaa can be any naturally occurring amino acid
  REGION 17..19: note = misc_feature - Xaa can be any naturally occurring amino acid
WXRVRIRHLEMXFXXEXXX

SEQ ID NO: 686 - protein, 19 aa, synthetic construct
  REGION 1..19: note = Synthetic
  SITE 2: note = misc_feature - Xaa can be any naturally occurring amino acid
  SITE 4: note = misc_feature - Xaa can be any naturally occurring amino acid
  SITE 8: note = misc_feature - Xaa can be any naturally occurring amino acid
  REGION 14..15: note = misc_feature - Xaa can be any naturally occurring amino acid
  SITE 18: note = misc_feature - Xaa can be any naturally occurring amino acid
QXSXLQYXIWVQGXXRDXA

SEQ ID NO: 687 - protein, 14 aa, synthetic construct
  REGION 1..14: note = Synthetic
  SITE 1: note = misc_feature - Xaa can be any naturally occurring amino acid
  REGION 4..5: note = misc_feature - Xaa can be any naturally occurring amino acid
  REGION 7..8: note = misc_feature - Xaa can be any naturally occurring amino acid
XDYXXLXXDLNQIS

SEQ ID NO: 688 - protein, 19 aa, synthetic construct
  REGION 1..19: note = Synthetic
  SITE 2: note = misc_feature - Xaa can be any naturally occurring amino acid
  SITE 4: note = misc_feature - Xaa can be any naturally occurring amino acid
  SITE 7: note = misc_feature - Xaa can be any naturally occurring amino acid
  REGION 11..13: note = misc_feature - Xaa can be any naturally occurring amino acid
  REGION 15..19: note = misc_feature - Xaa can be any naturally occurring amino acid
LXLXFMXLHAXXXEXXXXX

SEQ ID NO: 689 - protein, 14 aa, synthetic construct
  REGION 1..14: note = Synthetic
  REGION 2..3: note = misc_feature - Xaa can be any naturally occurring amino acid
  SITE 5: note = misc_feature - Xaa can be any naturally occurring amino acid
  REGION 8..10: note = misc_feature - Xaa can be any naturally occurring amino acid
  SITE 12: note = misc_feature - Xaa can be any naturally occurring amino acid
VXXLXQVXXXVXAP

SEQ ID NO: 690 - skipped

SEQ ID NO: 691 - protein, 10 aa, synthetic construct
  REGION 1..10: note = Synthetic
  SITE 5: note = misc_feature - Xaa can be any naturally occurring amino acid
  SITE 9: note = misc_feature - Xaa can be any naturally occurring amino acid
TLTNXPSEXF

SEQ ID NO: 692 - protein, 10 aa, synthetic construct
  REGION 1..10: note = Synthetic
  SITE 3: note = misc_feature - Xaa can be any naturally occurring amino acid
  SITE 6: note = misc_feature - Xaa can be any naturally occurring amino acid
  SITE 8: note = misc_feature - Xaa can be any naturally occurring amino acid
LPXQSXNXSF

SEQ ID NO: 693 - protein, 50 aa, synthetic construct; identical to SEQ ID NO: 670
  REGION 1..50: note = Synthetic
  SITE 3: note = misc_feature - Xaa can be any naturally occurring amino acid
  REGION 6..7: note = misc_feature - Xaa can be any naturally occurring amino acid
  SITE 17: note = misc_feature - Xaa can be any naturally occurring amino acid
  SITE 33: note = misc_feature - Xaa can be any naturally occurring amino acid
  SITE 35: note = misc_feature - Xaa can be any naturally occurring amino acid
  SITE 41: note = misc_feature - Xaa can be any naturally occurring amino acid
  SITE 49: note = misc_feature - Xaa can be any naturally occurring amino acid

SEQ ID NO: 694 - protein, 50 aa, synthetic construct; identical to SEQ ID NO: 671
  REGION 1..50: note = Synthetic
  SITE 10: note = misc_feature - Xaa can be any naturally occurring amino acid
  SITE 13: note = misc_feature - Xaa can be any naturally occurring amino acid
  REGION 24..25: note = misc_feature - Xaa can be any naturally occurring amino acid
  REGION 28..30: note = misc_feature - Xaa can be any naturally occurring amino acid
  SITE 34: note = misc_feature - Xaa can be any naturally occurring amino acid
  SITE 39: note = misc_feature - Xaa can be any naturally occurring amino acid
  SITE 45: note = misc_feature - Xaa can be any naturally occurring amino acid
  SITE 48: note = misc_feature - Xaa can be any naturally occurring amino acid

SEQ ID NO: 695 - protein, 50 aa, synthetic construct; identical to SEQ ID NO: 672
  REGION 1..50: note = Synthetic
  SITE 2: note = misc_feature - Xaa can be any naturally occurring amino acid
  SITE 11: note = misc_feature - Xaa can be any naturally occurring amino acid
  SITE 21: note = misc_feature - Xaa can be any naturally occurring amino acid
  REGION 24..25: note = misc_feature - Xaa can be any naturally occurring amino acid
  SITE 34: note = misc_feature - Xaa can be any naturally occurring amino acid
  REGION 39..41: note = misc_feature - Xaa can be any naturally occurring amino acid

SEQ ID NO: 696 - protein, 36 aa, synthetic construct; identical to SEQ ID NO: 673
  REGION 1..36: note = Synthetic
  SITE 1: note = misc_feature - Xaa can be any naturally occurring amino acid
  SITE 10: note = misc_feature - Xaa can be any naturally occurring amino acid
  SITE 14: note = misc_feature - Xaa can be any naturally occurring amino acid
  SITE 20: note = misc_feature - Xaa can be any naturally occurring amino acid
  SITE 30: note = misc_feature - Xaa can be any naturally occurring amino acid

SEQ ID NO: 697 - protein, 50 aa, synthetic construct; identical to SEQ ID NO: 674
  REGION 1..50: note = Synthetic
  SITE 6: note = misc_feature - Xaa can be any naturally occurring amino acid
  REGION 8..9: note = misc_feature - Xaa can be any naturally occurring amino acid
  REGION 11..12: note = misc_feature - Xaa can be any naturally occurring amino acid
  SITE 21: note = misc_feature - Xaa can be any naturally occurring amino acid
  REGION 28..29: note = misc_feature - Xaa can be any naturally occurring amino acid
  SITE 31: note = misc_feature - Xaa can be any naturally occurring amino acid
  SITE 33: note = misc_feature - Xaa can be any naturally occurring amino acid
  SITE 37: note = misc_feature - Xaa can be any naturally occurring amino acid
  REGION 41..42: note = misc_feature - Xaa can be any naturally occurring amino acid

SEQ ID NO: 698 - protein, 50 aa, synthetic construct; identical to SEQ ID NO: 675
  REGION 1..50: note = Synthetic
  SITE 2: note = misc_feature - Xaa can be any naturally occurring amino acid
  REGION 12..13: note = misc_feature - Xaa can be any naturally occurring amino acid
  SITE 17: note = misc_feature - Xaa can be any naturally occurring amino acid
  SITE 23: note = misc_feature - Xaa can be any naturally occurring amino acid
  REGION 30..31: note = misc_feature - Xaa can be any naturally occurring amino acid
  SITE 33: note = misc_feature - Xaa can be any naturally occurring amino acid
  REGION 38..39: note = misc_feature - Xaa can be any naturally occurring amino acid
  SITE 47: note = misc_feature - Xaa can be any naturally occurring amino acid

SEQ ID NO: 699 - protein, 45 aa, synthetic construct; identical to SEQ ID NO: 676
  REGION 1..45: note = Synthetic
  SITE 1: note = misc_feature - Xaa can be any naturally occurring amino acid
  SITE 3: note = misc_feature - Xaa can be any naturally occurring amino acid
  SITE 21: note = misc_feature - Xaa can be any naturally occurring amino acid
  SITE 24: note = misc_feature - Xaa can be any naturally occurring amino acid
  REGION 26..27: note = misc_feature - Xaa can be any naturally occurring amino acid
  SITE 29: note = misc_feature - Xaa can be any naturally occurring amino acid
  REGION 32..33: note = misc_feature - Xaa can be any naturally occurring amino acid
  SITE 37: note = misc_feature - Xaa can be any naturally occurring amino acid
  SITE 40: note = misc_feature - Xaa can be any naturally occurring amino acid

SEQ ID NO: 700 - protein, 50 aa, synthetic construct; identical to SEQ ID NO: 677
  REGION 1..50: note = Synthetic
  SITE 2: note = misc_feature - Xaa can be any naturally occurring amino acid
  SITE 12: note = misc_feature - Xaa can be any naturally occurring amino acid
  SITE 18: note = misc_feature - Xaa can be any naturally occurring amino acid
  SITE 20: note = misc_feature - Xaa can be any naturally occurring amino acid
  REGION 23..26: note = misc_feature - Xaa can be any naturally occurring amino acid
  SITE 30: note = misc_feature - Xaa can be any naturally occurring amino acid
  SITE 32: note = misc_feature - Xaa can be any naturally occurring amino acid
  REGION 40..41: note = misc_feature - Xaa can be any naturally occurring amino acid
  SITE 47: note = misc_feature - Xaa can be any naturally occurring amino acid

SEQ ID NO: 701 - protein, 50 aa, synthetic construct; identical to SEQ ID NO: 678
  REGION 1..50: note = Synthetic
  SITE 2: note = misc_feature - Xaa can be any naturally occurring amino acid
  SITE 12: note = misc_feature - Xaa can be any naturally occurring amino acid
  SITE 20: note = misc_feature - Xaa can be any naturally occurring amino acid
  SITE 28: note = misc_feature - Xaa can be any naturally occurring amino acid
  SITE 38: note = misc_feature - Xaa can be any naturally occurring amino acid
  SITE 49: note = misc_feature - Xaa can be any naturally occurring amino acid

SEQ ID NO: 702 - protein, 50 aa, synthetic construct; identical to SEQ ID NO: 679
  REGION 1..50: note = Synthetic
  REGION 2..4: note = misc_feature - Xaa can be any naturally occurring amino acid
  SITE 7: note = misc_feature - Xaa can be any naturally occurring amino acid
  REGION 9..11: note = misc_feature - Xaa can be any naturally occurring amino acid
  SITE 13: note = misc_feature - Xaa can be any naturally occurring amino acid
  REGION 15..16: note = misc_feature - Xaa can be any naturally occurring amino acid
  REGION 20..25: note = misc_feature - Xaa can be any naturally occurring amino acid
  SITE 27: note = misc_feature - Xaa can be any naturally occurring amino acid
  SITE 29: note = misc_feature - Xaa can be any naturally occurring amino acid
  SITE 31: note = misc_feature - Xaa can be any naturally occurring amino acid
  REGION 33..34: note = misc_feature - Xaa can be any naturally occurring amino acid
  SITE 37: note = misc_feature - Xaa can be any naturally occurring amino acid
  SITE 39: note = misc_feature - Xaa can be any naturally occurring amino acid
  REGION 42..45: note = misc_feature - Xaa can be any naturally occurring amino acid
  REGION 48..50: note = misc_feature - Xaa can be any naturally occurring amino acid

SEQ ID NO: 703 - protein, 50 aa, synthetic construct; identical to SEQ ID NO: 680
  REGION 1..50: note = Synthetic
  REGION 1..5: note = misc_feature - Xaa can be any naturally occurring amino acid
  REGION 9..11: note = misc_feature - Xaa can be any naturally occurring amino acid
  REGION 15..16: note = misc_feature - Xaa can be any naturally occurring amino acid
  SITE 19: note = misc_feature - Xaa can be any naturally occurring amino acid
  REGION 22..23: note = misc_feature - Xaa can be any naturally occurring amino acid
  SITE 27: note = misc_feature - Xaa can be any naturally occurring amino acid
  SITE 31: note = misc_feature - Xaa can be any naturally occurring amino acid
  REGION 34..35: note = misc_feature - Xaa can be any naturally occurring amino acid
  REGION 39..40: note = misc_feature - Xaa can be any naturally occurring amino acid

SEQ ID NO: 704 - protein, 36 aa, synthetic construct; identical to SEQ ID NO: 681
  REGION 1..36: note = Synthetic
  SITE 1: note = misc_feature - Xaa can be any naturally occurring amino acid
  SITE 3: note = misc_feature - Xaa can be any naturally occurring amino acid
  SITE 6: note = misc_feature - Xaa can be any naturally occurring amino acid
  SITE 10: note = misc_feature - Xaa can be any naturally occurring amino acid
  REGION 15..16: note = misc_feature - Xaa can be any naturally occurring amino acid
  REGION 20..21: note = misc_feature - Xaa can be any naturally occurring amino acid
  SITE 23: note = misc_feature - Xaa can be any naturally occurring amino acid
  SITE 27: note = misc_feature - Xaa can be any naturally occurring amino acid
  SITE 30: note = misc_feature - Xaa can be any naturally occurring amino acid
  REGION 34..35: note = misc_feature - Xaa can be any naturally occurring amino acid

SEQ ID NO: 705 - protein, 30 aa, synthetic construct; identical to SEQ ID NO: 682
  REGION 1..30: note = Synthetic
  REGION 1..6: note = misc_feature - Xaa can be any naturally occurring amino acid
  SITE 14: note = misc_feature - Xaa can be any naturally occurring amino acid
  REGION 23..24: note = misc_feature - Xaa can be any naturally occurring amino acid
  REGION 26..30: note = misc_feature - Xaa can be any naturally occurring amino acid

SEQ ID NO: 706 - protein, 26 aa, synthetic construct
  REGION 1..26: note = Synthetic
  REGION 1..3: note = misc_feature - Xaa can be any naturally occurring amino acid
  SITE 6: note = misc_feature - Xaa can be any naturally occurring amino acid
  SITE 12: note = misc_feature - Xaa can be any naturally occurring amino acid
  SITE 15: note = misc_feature - Xaa can be any naturally occurring amino acid
  SITE 20: note = misc_feature - Xaa can be any naturally occurring amino acid
  SITE 22: note = misc_feature - Xaa can be any naturally occurring amino acid
XXXPVXVVTDPXILXGMQTXVXIAEL

SEQ ID NO: 707 - protein, 26 aa, synthetic construct
  REGION 1..26: note = Synthetic
  SITE 5: note = misc_feature - Xaa can be any naturally occurring amino acid
  SITE 9: note = misc_feature - Xaa can be any naturally occurring amino acid
  SITE 13: note = misc_feature - Xaa can be any naturally occurring amino acid
  SITE 15: note = misc_feature - Xaa can be any naturally occurring amino acid
  REGION 20..21: note = misc_feature - Xaa can be any naturally occurring amino acid
  SITE 24: note = misc_feature - Xaa can be any naturally occurring amino acid
  SITE 26: note = misc_feature - Xaa can be any naturally occurring amino acid
EGLRXFQNXQVAXAXFAVLXXVAXIX

SEQ ID NO: 708 - protein, 19 aa, synthetic construct
  REGION 1..19: note = Synthetic
  SITE 2: note = misc_feature - Xaa can be any naturally occurring amino acid
  SITE 12: note = misc_feature - Xaa can be any naturally occurring amino acid
  REGION 14..15: note = misc_feature - Xaa can be any naturally occurring amino acid
  REGION 17..19: note = misc_feature - Xaa can be any naturally occurring amino acid
WXRVRIRHLEMXFXXEXXX

SEQ ID NO: 709 - protein, 19 aa, synthetic construct
  REGION 1..19: note = Synthetic
  SITE 2: note = misc_feature - Xaa can be any naturally occurring amino acid
  SITE 4: note = misc_feature - Xaa can be any naturally occurring amino acid
  SITE 8: note = misc_feature - Xaa can be any naturally occurring amino acid
  REGION 14..15: note = misc_feature - Xaa can be any naturally occurring amino acid
  SITE 18: note = misc_feature - Xaa can be any naturally occurring amino acid
QXSXLQYXIWVQGXXRDXA

SEQ ID NO: 710 - protein, 14 aa, synthetic construct
  REGION 1..14: note = Synthetic
  SITE 1: note = misc_feature - Xaa can be any naturally occurring amino acid
  REGION 4..5: note = misc_feature - Xaa can be any naturally occurring amino acid
  REGION 7..8: note = misc_feature - Xaa can be any naturally occurring amino acid
XDYXXLXXDLNQIS

SEQ ID NO: 711 - protein, 19 aa, synthetic construct
  REGION 1..19: note = Synthetic
  SITE 2: note = misc_feature - Xaa can be any naturally occurring amino acid
  SITE 4: note = misc_feature - Xaa can be any naturally occurring amino acid
  SITE 7: note = misc_feature - Xaa can be any naturally occurring amino acid
  REGION 11..13: note = misc_feature - Xaa can be any naturally occurring amino acid
  REGION 15..19: note = misc_feature - Xaa can be any naturally occurring amino acid
LXLXFMXLHAXXXEXXXXX

SEQ ID NO: 712 - protein, 14 aa, synthetic construct
  REGION 1..14: note = Synthetic
  REGION 2..3: note = misc_feature - Xaa can be any naturally occurring amino acid
  SITE 5: note = misc_feature - Xaa can be any naturally occurring amino acid
  REGION 8..10: note = misc_feature - Xaa can be any naturally occurring amino acid
  SITE 12: note = misc_feature - Xaa can be any naturally occurring amino acid
VXXLXQVXXXVXAP

SEQ ID NO: 713 - skipped

SEQ ID NO: 714 - protein, 10 aa, synthetic construct
  REGION 1..10: note = Synthetic
  SITE 5: note = misc_feature - Xaa can be any naturally occurring amino acid
  SITE 9: note = misc_feature - Xaa can be any naturally occurring amino acid
TLTNXPSEXF

SEQ ID NO: 715 - protein, 10 aa, synthetic construct
  REGION 1..10: note = Synthetic
  SITE 3: note = misc_feature - Xaa can be any naturally occurring amino acid
  SITE 6: note = misc_feature - Xaa can be any naturally occurring amino acid
  SITE 8: note = misc_feature - Xaa can be any naturally occurring amino acid
LPXQSXNXSF

SEQ ID NO: 716 - protein, 886 aa, Microsorum punctatum
MEYSSLYGDVNQVSLRFQNMEFSEVMVVHRMHVRLEELDMTGLEGIEKVKRLYVLADVVELPSTATQVFQYLRLPASISAIILCRVLYIPEVDQRPHMAQCSLDFPFMRLHVVGSAHENGGGVMQAFSSDATPSNIGIYFHADRFIYRQATSSASNFVLPLDVRVSFGSSTFSAPTLRPDWQNLNVSNIQYGPQHLSRGPPLTSSDSDLQRSDEIELLAQQDVWSPLLHVAFSPNAPPGNIPGTQGIFRPSSACSFFHVPPPDVPANVLTDPSIILGMQMNMLIAELVLAAHNSPQVMNVITKHVLWLNKILLQVASPNDDILALLFRIQAFMKMAKEPRFVVPRLQYHMYGSLINRMVQVAQNYDQEFKQLKLFIAQNKILGSYLLQQNRAFAEREREMSAFHSQVVSMRRSELQSAIQTMDNLSLQMESESEAMNEAQENMVEAIQEYERKLLARALFSVIGAIASVALAFATGGATAPGAVAAAGGAVAAAGRLAAGLQKVVDILQGLQAVMEVVVAIRDIVESLKNMGQLVEAPEMPEMPTDADWLIFVNEVEAVAEQVPTEVAEVPVWKAKCKNVAVLGQAMCTTAAYISELQYQITVEEMLQEIAQRQADRLVGISAADLSSYTEMASQIDMRTTRILLELIKMLYIQNAAIKYEYLYDANEKLNSWPVSMETVWTMLLQQENAALLGLLDLGPTNDFTVTYAVKDIPTKLLVDGFDWNFEIAVEDFAIFPSGLSRVRIRYVELKFDQQGADSSNIVIHQPSTNTGLVYMLLQGSRFVHDRKRQEVMDYEASTGPVYAYAYDLNTGATTLNNIPSQQQANTFMQMTPFNAWRLRLSASAAENQGLVFPTATSPDNTTQISITFYVTAIRRIDLRQEGDVE

SEQ ID NO: 717 - DNA, 2661 bp, Microsorum punctatum
  source 1..2661: mol_type = other DNA
atggagtatagcagcttgtatggtgatgtgaaccaagtgagcctgaggttccagaacatggagttctctgaggtcatggtggtgcatcggatgcatgtgcgcctggaggagcttgacatgacggggttggagggcatcgagaaggtgaaacgcctgtacgtgctggcggacgtggtggagctgccttccacagccacccaggtgtttcagtatctgcgccttcccgcctccatttcagctattatcctctgccgcgttctctatatccctgaagttgatcagaggccccacatggctcaatgctcgctcgacttcccgtttatgcgcctccatgtcgtcggatctgcacacgagaacggtgggggtgttatgcaagccttttcctccgacgccacccccagcaatattggcatctacttccatgctgaccgattcatctaccgccaggccacatcttcggccagcaactttgtcttgcccctggatgtaagggtcagctttggcagctctaccttctcggccccaaccctccgtcccgactggcaaaaccttaatgtctccaacatccagtacgggccgcagcatttgtccaggggcccacccctcacatcctcagactctgacttgcaaagatctgacgagatcgagctcctggcgcagcaagatgtttggagccctcttttacatgtcgcgttcagcccgaatgcaccacctggcaacatcccgggtacacaaggaattttccgaccctcctctgcatgcagctttttccatgtgccgccaccggatgtccctgcgaatgtgctcactgatccttccatcatcttgggcatgcaaatgaacatgctcattgctgagcttgtcttggctgctcacaattcgccgcaggtcatgaacgtcatcactaagcatgtgctatggctcaacaagatcttgcttcaggttgcttcacccaatgatgatattttagcactcttgtttcgtatccaagcattcatgaagatggcaaaggaaccgcggtttgtggttccacggttgcagtaccacatgtacggtagccttatcaatcgaatggtgcaagtagcccagaattatgaccaggagttcaagcaactgaagcttttcatcgcacaaaataagattttgggaagctatttgctacaacaaaatagggcttttgcagaaagggagagggaaatgagtgcttttcactcgcaagtcgtatcgatgaggagatctgagctgcagtctgccatacaaacaatggacaatttgagtttgcaaatggaatcagagagtgaggcgatgaacgaagcccaggagaacatggttgaagcaattcaagagtatgaaaggaaattacttgcaagagctctattttctgtgattggggcaatagcaagcgtcgctcttgcatttgccactggtggtgcaactgcaccaggggcagtggcagcagctggaggggctgttgctgcagcagggaggttggcagcagggctccaaaaggttgtggacatcctacaaggcttgcaagcagtcatggaggttgtggtagccataagagacatcgtagaatcattgaaaaacatgggtcaactagtagaagctcccgagatgccagagatgccaacggatgcggactggttaatttttgtaaatgaggtggaggcagtggcagagcaagtgccaacagaagtggcagaggtcccagtgtggaaggcgaagtgcaagaatgtggctgtgctagggcaagcaatgtgcaccacagcagcatatattagtgagctacagtatcagatcacggtggaagagatgctacaagagattgcacaacgccaagcagacaggttggtggggatatcagcagcagatctatcgagctacacagagatggcatcgcaaatagacatgcgtacaacccgaatcctccttgagctcatcaagatgttgtacattcaaaatgcagcaattaagtatgagtacttgtatgatgctaatgagaagcttaattcatggccagtgagcatggagactgtatggaccatgctcttgcaacaagagaatgcagctctcttgggcttgctagacttggggcccaccaatgatttcactgtaacctatgctgtgaaagatatacctaccaagttgttagtagatgggtttgattggaattttgagatcgcggtggaggattttgcaatctttccatcaggattgtctcgtgttcgcatacgatatgttgagcttaaatttgaccaacaaggtgctgatagtagtaacattgtcatccaccagcctagcactaacactggcttagtctacatgctcttacaaggctcccggttcgtccatgaccgcaaacgtcaggaggtgatggactatgaggcaagcacgggacctgtatatgcatatgcctatgacctcaacactggtgcaaccactctcaacaacatcccctcacagcaacaggccaacacatttatgcaaatgacacccttcaatgcttggagacttcgcctctctgcctctgctgccgaaaatcagggattggtgtttcctacagcaacttctccggacaatactacccaaatttccatcacattctatgtcactgctattcgacgcatagatcttcgacaagagggtgatgtggagtaa

SEQ ID NO: 718 - DNA, 2598 bp, synthetic construct
  misc_feature 1..2598: note = Synthetic
  source 1..2598: mol_type = other DNA
atggctctcgtggattacggcaagcttttcgaggatctgaaccagataagcatgggtgtactggatcgggtagagttttcagaggtgatggtgatccacaggatgtatgtgaggctagctgatctgaatgtggggcagctcgagggagccgagaaagtgaagcggttgtatgtgtttgcggacgtggtggagctaccagtcgtggaatggcggtggccgccgcaaataccaggatcggtgacggtgatcatattgtgtcgtcttcttcaatggccaactgatgggaggcagtcggacaccgagctccacctgacattcatgaagttgcatgccatacaacgagaggaaaatcggtgggagataaccgcagcagatggcatgaactggggagtttacatacacgcagaggaagtacaggttggcgtgctgacaatgtcatggtcttcggtacttagagtttcggcacttcgctctgttataacctccggctttcgcgccgttagtgtgtttgaggtaccgggaagtgtaaggtccacccttggagctactttaaggcccgatcacgccttatatagtacaactatgcaagccacacccaacgcatcgcatattagtgcttttaaccttcgcatagtttccccgtcggcatatcgtgtttgtcctctccaaaatgacacagatacctacttaggtattccagcagacgtggcggcagttcttccagtagacgtggtgactgatcctaacatcttgctgggcatgcagacaacggtacacattgcggagctagtcaaggcatgtcatccgtcacccgatgttgtgagcgctgtaggggagcacctgaactggctcaacaaactcttactcccacttaaggaatcgactcagttgcaagggaccgaggcctacaacgagtgccttgcgcttttaggtcgcattcaatgtgtcatgaagatggggccgtttgtctcggtagtgccgcagctgcaatacagaatgtatggtagcctcatcagacaaatggcccaggtagcacagaactacgaccaagatttcaggcagctcaagttattcattgcccaaaaccaaatccttggcagctatttgctgcagcagaacaaggcctttgctgacagagaggtgcagatggagagctttcattcagcggtcatttctcaaagaaggcaggagttggacgacgccatcgctaagatggaccgactgagcttgcagatggaggaagaggacagagcaatggagcaagcccgaaaagaaatggaagaaggattgaagcagttccagaatgagcaagttgcaagggctgtgttcgctgttcttaaatctgtagctatgattgcgctcgcattcgtcacggctggtgcaacggctcctggggctgcagcatctgcagcgcaagctgtgaacatagccggtcaagcggcacaagctctgcgaagggtggtggaaattctagaggggctcgaggctgtgatggaggttgtggctgctataaagcaccttgtggatgctctggaccaggtaagtcagattgtggatgcaccacctatgccagacatgccctcggaggcggactggagtatttttgtgaatgagattgaagccgtggcagaggggatgccgacggaagtctcggaggttccggcgtggaaggccaagtgcaagaatgtggctgcactgggtagggagatgtgcatcacggcagaacagatttcccagctccagtatgacatctgggtgcaaggcttgttgcgggatatagctcaaagccacgcagaccggctggcagcgattcaacctgctaatcttaccaactatttggagatggcaatacagatggatatgcggactacgaggatactgatagggctcctcaacataatgcgcatccagaatgcggcacttatgtatgagtaccttctaacgcccacgcagctcactgcatggccgctgagaatggatactgtggccaacttgctcatcacgcacgagagtgctgcactgtcaggattagctcagttagggcccccatcggacttcacgagcaggcatgtagtgaaaggcatacctgtgagcttgcttctagacggtggggattgggaatttgagattcctgtgcaaggtggcatgtccagtttcccttccagctggactcgagtgcggattcggcacctggagatgcactttgtgcaggaggcgagcggtggcggcgagattatccaccagcctgccacccagacggggaccatttacatcctcctgcagggctccactgtcttccatgatcgcagaagggaggaggtgatgacctttcaggcagcggttccgctcaactaccattacgcgtaccgcctcgacactggagaagccactcttacgaacgagccctcggaacagtttgccaacacattcatgcagatgacaccgttcactcactggaggctacgtctgtctgcgtccgcagcggagaataaaggattagcctttcccacagctacagctcccgactccaccactgagattgccatcactttccatgttacggccattagacaaattgactggcggcaagaggaggag

SEQ ID NO: 719 - DNA, 2598 bp, synthetic construct
  misc_feature 1..2598: note = Synthetic
  source 1..2598: mol_type = other DNA
atggctctcgtggattacggcaagcttttcgaggatctgaaccagataagcatgggtgtactggatcgggtagagttttcagaggtgatggtgatccacaggatgtatgtgaggctagctgatctgaatgtggggcagctcgagggagccgagaaagtgaagcggttgtatgtgtttgcggacgtggtggagctaccagtcgtggaatggcggtggccgccgcaaataccaggatcggtgacggtgatcatattgtgtcgtcttcttcaatggccaactgatgggaggcagtcggacaccgagctccacctgacattcatgaagttgcatgccatacaacgagaggaaaatcggtgggagataaccgcagcagatggcatgaactggggagtttacatacacgcagaggaagtacaggttggcgtgctgacaatgtcatggtcttcggtacttagagtttcggcacttcgctctgttataacctccggctttcgcgccgttagtgtgtttgaggtaccgggaagtgtaaggtccacccttggagctactttaaggcccgatcacgccttatatagtacaactatgcaagccacacccaacgcatcgcatattagtgcttttaaccttcgcatagtttccccgtcggcatatcgtgtttgtcctctccaaaatgacacagatacctacttaggtattccagcagacgtggcggcagttcttccagtagacgtggtgactgatcctaacatcttgctgggcatgcagacaacggtacacattgcggagctagtcaaggcatgtcatccgtcacccgatgttgtgagcgctgtaggggagcacctgaactggctcaacaaactcttactcccacttaaggaatcgactcagttgcaaggaagcgagtcgtacaaggagtgccttgcactcttgggtcgtgttcatgctgcgatgaagatggggccgtttgtctcggtagtgccgcagctgcaatacagaatgtatggtagcctcatcagacaaatggcccaggtagcacagaactacgaccaagatttcaggcagctcaagttattcattgcccaaaaccaaatccttggcagctatttgctgcagcagaacaaggcctttgctgacagagaggtgcagatggagagctttcattcagcggtcatttctcaaagaaggcaggagttggacgacgccatcgctaagatggaccgactgagcttgcagatggaggaagaggacagagcaatggagcaagcccgaaaagaaatggaagaaggattgaagcagttccagaatgagcaagttgcaagggctgtgttcgctgttcttaaatctgtagctatgattgcgctcgcattcgtcacggctggtgcaacggctcctggggctgcagcatctgcagcgcaagctgtgaacatagccggtcaagcggcacaagctctgcgaagggtggtggaaattctagaggggctcgaggctgtgatggaggttgtggctgctataaagcaccttgtggatgctctggaccaggtaagtcagattgtggatgcaccacctatgccagacatgccctcggaggcggactggagtatttttgtgaatgagattgaagccgtggcagaggggatgccgacggaagtctcggaggttccggcgtggaaggccaagtgcaagaatgtggctgcactgggtagggagatgtgcatcacggcagaacagatttcccagctccagtatgacatctgggtgcaaggcttgttgcgggatatagctcaaagccacgcagaccggctggcagcgattcaacctgctaatcttaccaactatttggagatggcaatacagatggatatgcggactacgaggatactgatagggctcctcaacataatgcgcatccagaatgcggcacttatgtatgagtaccttctaacgcccacgcagctcactgcatggccgctgagaatggatactgtggccaacttgctcatcacgcacgagagtgctgcactgtcaggattagctcagttagggcccccatcggacttcacgagcaggcatgtagtgaaaggcatacctgtgagcttgcttctagacggtggggattgggaatttgagattcctgtgcaaggtggcatgtccagtttcccttccagctggactcgagtgcggattcggcacctggagatgcactttgtgcaggaggcgagcggtggcggcgagattatccaccagcctgccacccagacggggaccatttacatcctcctgcagggctccactgtcttccatgatcgcagaagggaggaggtgatgacctttcaggcagcggttccgctcaactaccattacgcgtaccgcctcgacactggagaagccactcttacgaacgagccctcggaacagtttgccaacacattcatgcagatgacaccgttcactcactggaggctacgtctgtctgcgtccgcagcggagaataaaggattagcctttcccacagctacagctcccgactccaccactgagattgccatcactttccatgttacggccattagacaaattgactggcggcaagaggaggag

SEQ ID NO: 720 - DNA, 2563 bp, synthetic construct
  misc_feature 1..2563: note = Synthetic
  source 1..2563: mol_type = other DNA
atggattacagcacgctttacagggatctgaaccagataagcatgcccctggatcgggtagagttctcagaggtgatggtaatccacaggatgtacttgaggttatctgatctgaatgtgggggagctccccggagccgagagggtgaagcggttgtatgtgttggcagacgtggtggagctcgcaacatttgcgcatccacagttgcttaatacgcggatgccaggatcggtgacggtgatcattctgtgtcgtcttcttcagtttccaactgatgggtcgttcgctgcttggctcgagctgccgttcatggagttgcacacactcatagaacaatacaggtcagagataaaagcagcagatgacgcgaaatggggaacgtatgtacacgcggaggaagtacagctcagcccgctgtttaatgggtggccttatctggttgttgaggcacagcgctgtattataaccgcggccatgcacaatacatttaaccgccctgggtgggttcgctccattactcaatttacaactgatcagtccggtcgggtagataccacactgctcgcacgaacagaattcggccatattgatctaccactcgaaacagattccccaacggcattcagtgtttcacaccgccaaagtacgaatttgcccgtagagtacaccggtattccagtggaggtggtgaccgatcctaacatcttgatgggcatgcaaaccagcgtgcacattgcggagctagtgaaggcatgttacccgtcaccagaattagtgagcgctgtaggggtgcacgtgaattggctcaacgaagtcttgctccgagttgtccagaaggaatctcagttgcaaggaagcgagtcgtacaaggagtgccttgcactcttgggtcgtgttcacgctgcgatgaagatggtgagaattggcttagtagtgccccagctgcaatacagaatgtacggtagcctcatcaaccaaatggcccaagtagcacaaaactacgaccgagaattcaagcaattcaaattattcatcatccaaaatcaaatccttggcagctatttgctgcagcagaacagggcatttgctgagagggagctgcagatggagagctttcatgctgctgtcatttctcaaagaagggaggagttggacaatacattcgcaaagatggaccgattgagcgggcaaatggaggcagagagtagtgcaatggagcaagccaaaaaggaaatggacgaaggattgaggcagttccagaataggcaagttgcgaacgccctctttgccgttcttagcgctgtagctcagattgggcttgcattccttacggctggtgcaacggctcctggagctgtggcgtcggcggggcaagctgtgagcatagcaggtcaggcggcgcaaggtctgcgaagggtggtggaaattctagagcagctggaggctgtgatggaggttgtggctgctgtgaaggacctcgtggattcattggaacaggtaggtcagattgtggacgcaccggtgatgccggaattgccctcagaggcggactggtccatttttgtgaacgaggtggaggccgtggcagagggcatgccaacggaagtctcggaggttccggtgtggagggccaagtgcaagaatgtggctgcactgggtcgggagatgagcatcacggcagtacagatgtcggagctgcagtatgacatctgggtgcaaggcatgatgcgggatatggctcgaagccaggcagacaggctggccgcaattcaacccgcggaccttaccaactatttggagatggctacccagatggatatgcggactacgaggatgctgctggggctcctcaacatattgcgcatccagaatgcggcgctcaggtacgagtatcttctaatgcccacggagctcacaacatggccactgggtatggataccgtgggtgacttgctcatcgcgcaggagaatgctgcactgataggattaatgcagctagggccctcatctgatttcacgagcaggcatgtggtgaaagacatacctgtgaacttgctgctcgatggcgaggattgggagtttgagattcctgtgcaagctggcatgtccagcttcccttccagctggtctcgcgtccgtattcggcacctggagatgcactttgtgaaggaggccagcggtattggtggtgagattatccaccagcctaccacccagactgggaccgtttacatccttctgcagggttccactatcttccatgaccgcagaagagaccaggtgttgccttttcaggccgctgctccgctcaactaccattacgcgtaccgcctcgacaccggcgactccactctcacaaacgaaccctctgaacagtttgccaacaagttcatgcagatgacacccttcacccgttggaggcttcgtctgtctgcgtccgcaaaagagaatgcaggattagcctttcccacggctacagcacttgactccactacccagattgtcatcactttccatgttacggccatcagacaaattgactggcggcacgacgaagagtagc

SEQ ID NO: 721 - DNA, 2601 bp, synthetic construct
  misc_feature 1..2601: note = Synthetic
  source 1..2601: mol_type = other DNA
atggctctcgtggattacggcaagcttttcgaggatctgaaccagataagcatgggtgtactggatcgggtagagttttcagaggtgatggtgatccacaggatgtatgtgaggctagctgatctgaatgtggggcagctcgagggagccgagaaagtgaagcggttgtatgtgtttgcggacgtggtggagctaccagtcgtggaatggcggtggccgccgcaaataccaggatcggtgacggtgatcatattgtgtcgtcttcttcaatggccaactgatgggaggcagtcggacaccgagctccacctgacattcatgaagttgcatgccatacaacgagaggaaaatcggtgggagataaccgcagcagatggcatgaactggggagtttacatacacgcagaggaagtacaggttggcgtgctgacaatgtcatggtcttcggtacttagagtttcggcacttcgctctgttataacctccggctttcgcgccgttagtgtgtttgaggtaccgggaagtgtaaggtccacccttggagctactttaaggcccgatcacgccttatatagtacaactatgcaagccacacccaacgcatcgcatattagtgcttttaaccttcgcatagtttccccgtcggcatatcgtgtttgtcctctccaaaatgacacagatacctacttaggtattccagcagacgtggcggcagttcttccagtagacgtggtgactgatcctaacatcttgctgggcatgcagacaacggtacacattgcggagctagtcaaggcatgtcatccgtcacccgatgttgtgagcgctgtaggggagcacgtgaattggctcaacgaagtcttgctccgagttgtccagaaggaatctcagttgcaagggaccgaggcctacaacgagtgccttgcgcttttaggtcgcattcaatgtgtcatgaagatggggccgtttgtctcggtagtgccgcagctgcaatacagaatgtatggtagcctcatcagacaaatggcccaggtagcacagaactacgaccaagatttcaggcagctcaagttattcattgcccaaaaccaaatccttggcagctatttgctgcagcagaacaaggcctttgctgacagagaggtgcagatggagagctttcattcagcggtcatttctcaaagaaggcaggagttggacgacgccatcgctaagatggaccgactgagcttgcagatggaggaagaggacagagcaatggagcaagcccgaaaagaaatggaagaaggattgaagcagttccagaatgagcaagttgcaagggctgtgttcgctgttcttaaatctgtagctatgattgcgctcgcattcgtcacggctggtgcaacggctcctggggctgcagcatctgcagcgcaagctgtgaacatagccggtcaagcggcacaagctctgcgaagggtggtggaaattctagaggggctcgaggctgtgatggaggttgtggctgctataaagcaccttgtggatgctctggaccaggtaagtcagattgtggatgcaccacctatgccagacatgccctcggaggcggactggagtatttttgtgaatgagattgaagccgtggcagaggggatgccgacggaagtctcggaggttccggcgtggaaggccaagtgcaagaatgtggctgcactgggtagggagatgtgcatcacggcagaacagatttcccagctccagtatgacatctgggtgcaaggcttgttgcgggatatagctcaaagccacgcagaccggctggcagcgattcaacctgctaatcttaccaactatttggagatggcaatacagatggatatgcggactacgaggatactgatagggctcctcaacataatgcgcatccagaatgcggcacttatgtatgagtaccttctaacgcccacgcagctcactgcatggccgctgagaatggatactgtggccaacttgctcatcacgcacgagagtgctgcactgtcaggattagctcagttagggcccccatcggacttcacgagcaggcatgtagtgaaaggcatacctgtgagcttgcttctagacggtggggattgggaatttgagattcctgtgcaaggtggcatgtccagtttcccttccagctggactcgagtgcggattcggcacctggagatgcactttgtgcaggaggcgagcggtggcggcgagattatccaccagcctgccacccagacggggaccatttacatcctcctgcagggctccactgtcttccatgatcgcagaagggaggaggtgatgacctttcaggcagcggttccgctcaactaccattacgcgtaccgcctcgacactggagaagccactcttacgaacgagccctcggaacagtttgccaacacattcatgcagatgacaccgttcactcactggaggctacgtctgtctgcgtccgcagcggagaataaaggattagcctttcccacagctacagctcccgactccaccactgagattgccatcactttccatgttacggccattagacaaattgactggcggcaagaggaggag

SEQ ID NO: 722 - DNA, 2550 bp, synthetic construct
  misc_feature 1..2550: note = Synthetic
  source 1..2550: mol_type = other DNA
atggattacagcacgctttacagggatctgaaccagataagcatgcccctggatcgggtagagttctcagaggtgatggtaatccacaggatgtacttgaggttatctgatctgaatgtggggcagctcgagggagccgagagggtgaagcggttgtatgtgtttgcggacgtggtggagctaccagtcgtggaatggcggtggccgccgcaaataccaggatcggtgacggtgatcatattgtgtcgtcttcttcagtttccaactgatgggtcgttcgctgcttggctcgggctgccgttcatggagttgcacacactcatagaacaatacaggtcagagataaaagcagcagatgacgcgaaatggggaacgtatgtacacgcggaggaagtacagctcagcccgctgtttaatgggtggccttatctggttgttgaggcacagcgctgtattataaccgcggccatgcacaatacatttaaccgccctgggtgggttcgctccattactcaatttacaactgatcagtccggtcgggtagataccacactgctcgcacgaacagaattcggccatattgatctaccactcgaaacagattccccaacggcattcagtgtttcacaccgccaaagtacgaatttgcccgtagagtacaccggtattccagtggaggtggtgaccgatcctaacatcttgatgggcatgcaaaccagcgtgcacattgcggagctagtgaaggcatgttacccgtcaccagaattagtgagcgctgtaggggtgcacgtgaattggctcaacgaagtcttgctccgagttgtccagaaggaatctcagttgcaagggaccgaggcctacaacgagtgccttgcgcttttaggtcgcattcaatgtgtcatgaagatggggccgtttgtctcggtagtgccgcagctgcaatacagaatgtatggtagcctcatcagacaaatggcccaggtagcacagaactacgaccaagatttcaggcagctcaagttattcattgcccaaaaccaaatccttggcagctatttgctgcagcagaacaaggcctttgctgacagagaggtgcagatggagagctttcattcagcggtcatttctcaaagaaggcaggagttggacgacgccatcgctaagatggaccgactgagcttgcagatggaggaagaggacagagcaatggagcaagcccgaaaagaaatggaagaaggattgaagcagttccagaatgagcaagttgcaagggctgtgttcgctgttcttaaatctgtagctatgattgcgctcgcattcgtcacggctggtgcaacggctcctggggctgcagcatctgcagcgcaagctgtgaacatagccggtcaagcggcacaagctctgcgaagggtggtggaaattctagaggggctcgaggctgtgatggaggttgtggctgctataaagcaccttgtggatgctctggaccaggtaagtcagattgtggatgcaccacctatgccagacatgccctcggaggcggactggagtatttttgtgaatgagattgaagccgtggcagaggggatgccgacggaagtctcggaggttccggcgtggaaggccaagtgcaagaatgtggctgcactgggtagggagatgtgcatcacggcagaacagatttcccagctccagtatgacatctgggtgcaaggcttgttgcgggatatagctcaaagccacgcagaccggctggcagcgattcaacctgctaatcttaccaactatttggagatggcaatacagatggatatgcggactacgaggatactgatagggctcctcaacataatgcgcatccagaatgcggcacttatgtatgagtaccttctaacgcccacgcagctcactgcatggccgctgagaatggatactgtggccaacttgctcatcacgcacgagagtgctgcactgtcaggattagctcagttagggcccccatcggacttcacgagcaggcatgtagtgaaaggcatacctgtgagcttgcttctagacggtggggattgggaatttgagattcctgtgcaaggtggcatgtccagtttcccttccagctggactcgagtgcggattcggcacctggagatgcactttgtgcaggaggcgagcggtggcggcgagattatccaccagcctgccacccagacggggaccatttacatcctcctgcagggctccactgtcttccatgatcgcagaagggaggaggtgatgacctttcaggcagcggttccgctcaactaccattacgcgtaccgcctcgacactggagaagccactcttacgaacgagccctcggaacagtttgccaacacattcatgcagatgacaccgttcactcactggaggctacgtctgtctgcgtccgcagcggagaataaaggattagcctttcccacagctacagctcccgactccaccactgagattgccatcactttccatgttacggccattagacaaattgactggcggcaagaggaggag

SEQ ID NO: 723 - DNA, 2589 bp, synthetic construct
  misc_feature 1..2589: note = Synthetic
  source 1..2589: mol_type = other DNA
atggattacagcacgctttacagggatctgaaccagataagcatgcccctggatcgggtagagttctcagaggtgatggtaatccacaggatgtacttgaggttatctgatctgaatgtgggggagctccccggagccgagagggtgaagcggttgtatgtgtttgcggacgtggtggagctaccagtcgtggaatggcggtggccgccgcaaataccaggatcggtgacggtgatcattctgtgtcgtcttcttcaatggccaactgatgggaggcagtcggacaccgagctccacctgacattcatgaagttgcatgccatacaacgagaggaaaatcggtgggagataaccgcagcagatggcatgaactggggagtttacatacacgcagaggaagtacaggttggcgtgctgacaatgtcatggtcttcggtacttagagtttcggcacttcgctctgttataacctccggctttcgcgccgttagtgtgtttgaggtaccgggaagtgtaaggtccacccttggagctactttaaggcccgatcacgccttatatagtacaactatgcaagccacacccaacgcatcgcatattagtgcttttaaccttcgcatagtttccccgtcggcatatcgtgtttgtcctctccaaaatgacacagatacctacttaggtattccagcagacgtggcggcagttcttccagtagacgtggtgaccgatcctaacatcttgatgggcatgcaaaccagcgtgcacattgcggagctagtcaaggcatgtcatccgtcacccgatgttgtgagcgctgtaggggtgcacgtgaattggctcaacgaagtcttgctccgagttgtccagaaggaatctcagttgcaagggaccgaggcctacaacgagtgccttgcgcttttaggtcgcattcaatgtgtcatgaagatggggccgtttgtctcggtagtgccgcagctgcaatacagaatgtatggtagcctcatcagacaaatggcccaggtagcacagaactacgaccaagatttcaggcagctcaagttattcattgcccaaaaccaaatccttggcagctatttgctgcagcagaacaaggcctttgctgacagagaggtgcagatggagagctttcattcagcggtcatttctcaaagaaggcaggagttggacgacgccatcgctaagatggaccgactgagcttgcagatggaggaagaggacagagcaatggagcaagcccgaaaagaaatggaagaaggattgaagcagttccagaatgagcaagttgcaagggctgtgttcgctgttcttaaatctgtagctatgattgcgctcgcattcgtcacggctggtgcaacggctcctggggctgcagcatctgcagcgcaagctgtgaacatagccggtcaagcggcacaagctctgcgaagggtggtggaaattctagaggggctcgaggctgtgatggaggttgtggctgctataaagcaccttgtggatgctctggaccaggtaagtcagattgtggatgcaccacctatgccagacatgccctcggaggcggactggagtatttttgtgaatgagattgaagccgtggcagaggggatgccgacggaagtctcggaggttccggcgtggaaggccaagtgcaagaatgtggctgcactgggtagggagatgtgcatcacggcagaacagatttcccagctccagtatgacatctgggtgcaaggcttgttgcgggatatagctcaaagccacgcagaccggctggcagcgattcaacctgctaatcttaccaactatttggagatggcaatacagatggatatgcggactacgaggatactgatagggctcctcaacataatgcgcatccagaatgcggcacttatgtatgagtaccttctaacgcccacgcagctcactgcatggccgctgagaatggatactgtggccaacttgctcatcacgcacgagagtgctgcactgtcaggattagctcagttagggcccccatcggacttcacgagcaggcatgtagtgaaaggcatacctgtgagcttgcttctagacggtggggattgggaatttgagattcctgtgcaaggtggcatgtccagtttcccttccagctggactcgagtgcggattcggcacctggagatgcactttgtgcaggaggcgagcggtggcggcgagattatccaccagcctgccacccagacggggaccatttacatcctcctgcagggctccactgtcttccatgatcgcagaagggaggaggtgatgacctttcaggcagcggttccgctcaactaccattacgcgtaccgcctcgacactggagaagccactcttacgaacgagccctcggaacagtttgccaacacattcatgcagatgacaccgttcactcactggaggctacgtctgtctgcgtccgcagcggagaataaaggattagcctttcccacagctacagctcccgactccaccactgagattgccatcactttccatgttacggccattagacaaattgactggcggcaagaggaggag

SEQ ID NO: 724 - DNA, 2608 bp, synthetic construct
  misc_feature 1..2608: note = Synthetic
  source 1..2608: mol_type = other DNA
atggctctcgtggattacggcaagcttttcgaggatctgaaccagataagcatgggtgtactggatcgggtagagttttcagaggtgatggtgatccacaggatgtatgtgaggctagctgatctgaatgtggggcagctcgagggagccgagaaagtgaagcggttgtatgtgtttgcagacgtggtggagctaccagtcgtggaatggcggtggccgccgcaaataccaggatcggtgacggtgatcatattgtgtcgtcttcttcaatggccaactgatgggaggcagtcggacaccgagctccacctgacattcatgaagttgcatgccatacaacgagaggaaaatcggtgggagataaccgcagcagatggcatgaactggggagtttacatacacgcagaggaagtacaggttggcgtgctgacaatgtcatggtcttcggtacttagagtttcggcacttcgctctgttataacctccggctttcgcgccgttagtgtgtttgaggtaccgggaagtgtaaggtccacccttggagctactttaaggcccgatcacgccttatatagtacaactatgcaagccacacccaacgcatcgcatattagtgcttttaaccttcgcatagtttccccgtcggcatatcgtgtttgtcctctccaaaatgacacagatacctacttaggtattccagcagacgtggcggcagttcttccagtagacgtggtgactgatcctaacatcttgctgggcatgcagacaacggtacacattgcggagctagtgaaggcatgtcatccgtcacccgatgttgtgagcgctgtaggggtgcacgtgaattggctcaacgaagtcttgctccgagttgtccagaaggaatctcagttgcaagggaccgaggcctacaacgagtgccttgcgcttttaggtcgcattcaatgtgtcatgaagatggggccgtttgtctcggtagtgccgcagctgcaatacagaatgtacggtagcctcatcaaccaaatggcccaagtagcacaaaactacgaccgagaattcaagcaattcaaattattcatcatccaaaatcaaatccttggcagctatttgctgcagcagaacagggcatttgctgagagggagctgcagatggagagctttcatgctgctgtcatttctcaaagaagggaggagttggacaatacattcgcaaagatggaccgattgagcgggcaaatggaggcagagagtagtgcaatggagcaagccaaaaaggaaatggacgaaggattgaggcagttccagaataggcaagttgcgaacgccctctttgccgttcttagcgctgtagctcagattgggcttgcattccttacggctggtgcaacggctcctggagctgtggcgtcggcggggcaagctgtgagcatagcaggtcaggcggcgcaaggtctgcgaagggtggtggaaattctagagcagctggaggctgtgatggaggttgtggctgctgtgaaggacctcgtggattcattggaacaggtaggtcagattgtggacgcaccggtgatgccggaattgccctcagaggcggactggtccatttttgtgaacgaggtggaggccgtggcagagggcatgccaacggaagtctcggaggttccggtgtggagggccaagtgcaagaatgtggctgcactgggtcgggagatgagcatcacggcagtacagatgtcggagctgcagtatgacatctgggtgcaaggcatgatgcgggatatggctcgaagccaggcagacaggctggccgcaattcaacccgcggaccttaccaactatttggagatggctacccagatggatatgcggactacgaggatgctgctggggctcctcaacatattgcgcatccagaatgcggcgctcaggtacgagtatcttctaatgcccacggagctcacaacatggccactgggtatggataccgtgggtgacttgctcatcgcgcaggagaatgctgcactgataggattaatgcagctagggccctcatctgatttcacgagcaggcatgtggtgaaagacatacctgtgaacttgctgctcgatggcgaggattgggagtttgagattcctgtgcaagctggcatgtccagcttcccttccagctggtctcgcgtccgtattcggcacctggagatgcactttgtgaaggaggccagcggtattggtggtgagattatccaccagcctaccacccagactgggaccgtttacatccttctgcagggttccactatcttccatgaccgcagaagagaccaggtgttgccttttcaggccgctgctccgctcaactaccattacgcgtaccgcctcgacaccggcgactccactctcacaaacgaaccctctgaacagtttgccaacaagttcatgcagatgacacccttcacccgttggaggcttcgtctgtctgcgtccgcaaaagagaatgcaggattagcctttcccacggctacagcacttgactccactacccagattgtcatcactttccatgttacggccatcagacaaattgactggcggcacgacgaagagtagc

SEQ ID NO: 725 - DNA, 2586 bp, synthetic construct
  misc_feature 1..2586: note = Synthetic
  source 1..2586: mol_type = other DNA
atggattacagcacgctttacagggatctgaaccagataagcatgcccctggatcgggtagagttctcagaggtgatggtaatccacaggatgtacttgaggttatctgatctgaatgtggggcagctcgagggagccgagaaagtgaagcggttgtatgtgtttgcggacgtggtggagctaccagtcgtggaatggcggtggccgccgcaaataccaggatcggtgacggtgatcatattgtgtcgtcttcttcaatggccaactgatgggaggcagtcggacaccgagctccacctgacattcatgaagttgcatgccatacaacgagaggaaaatcggtgggagataaccgcagcagatggcatgaactggggagtttacatacacgcagaggaagtacaggttggcgtgctgacaatgtcatggtcttcggtacttagagtttcggcacttcgctctgttataacctccggctttcgcgccgttagtgtgtttgaggtaccgggaagtgtaaggtccacccttggagctactttaaggcccgatcacgccttatatagtacaactatgcaagccacacccaacgcatcgcatattagtgcttttaaccttcgcatagtttccccgtcggcatatcgtgtttgtcctctccaaaatgacacagatacctacttaggtattccagcagacgtggcggcagttcttccagtagacgtggtgactgatcctaacatcttgctgggcatgcagacaacggtacacattgcggagctagtcaaggcatgtcatccgtcacccgatgttgtgagcgctgtaggggagcacctgaactggctcaacaaactcttactcccacttaaggaatcgactcagttgcaaggaagcgagtcgtacaaggagtgccttgcactcttgggtcgtgttcacgctgcgatgaagatggtgagaattggcttagtagtgccccagctgcaatacagaatgtacggtagcctcatcaaccaaatggcccaagtagcacaaaactacgaccgagaattcaagcaattcaaattattcatcatccaaaatcaaatccttggcagctatttgctgcagcagaacaaggcctttgctgacagagaggtgcagatggagagctttcattcagcggtcatttctcaaagaaggcaggagttggacgacgccatcgctaagatggaccgactgagcttgcagatggaggaagaggacagagcaatggagcaagcccgaaaagaaatggaagaaggattgaagcagttccagaatgagcaagttgcaagggctgtgttcgctgttcttaaatctgtagctatgattgcgctcgcattcgtcacggctggtgcaacggctcctggggctgcagcatctgcagcgcaagctgtgaacatagccggtcaagcggcacaagctctgcgaagggtggtggaaattctagaggggctcgaggctgtgatggaggttgtggctgctataaagcaccttgtggatgctctggaccaggtaagtcagattgtggatgcaccacctatgccagacatgccctcggaggcggactggagtatttttgtgaatgagattgaagccgtggcagaggggatgccgacggaagtctcggaggttccggcgtggaaggccaagtgcaagaatgtggctgcactgggtagggagatgtgcatcacggcagaacagatttcccagctccagtatgacatctgggtgcaaggcttgttgcgggatatagctcaaagccacgcagaccggctggcagcgattcaacctgctaatcttaccaactatttggagatggcaatacagatggatatgcggactacgaggatactgatagggctcctcaacataatgcgcatccagaatgcggcacttatgtatgagtaccttctaacgcccacgcagctcactgcatggccgctgagaatggatactgtggccaacttgctcatcacgcacgagagtgctgcactgtcaggattagctcagttagggcccccatcggacttcacgagcaggcatgtagtgaaaggcatacctgtgagcttgcttctagacggtggggattgggaatttgagattcctgtgcaaggtggcatgtccagtttcccttccagctggactcgagtgcggattcggcacctggagatgcactttgtgcaggaggcgagcggtggcggcgagattatccaccagcctgccacccagacggggaccatttacatcctcctgcagggctccactgtcttccatgatcgcagaagggaggaggtgatgacctttcaggcagcggttccgctcaactaccattacgcgtaccgcctcgacactggagaagccactcttacgaacgagccctcggaacagtttgccaacacattcatgcagatgacaccgttcactcactggaggctacgtctgtctgcgtccgcagcggagaataaaggattagcctttcccacagctacagctcccgactccaccactgagattgccatcactttccatgttacggccattagacaaattgactggcggcaagaggaggag

SEQ ID NO: 726 - DNA, 2595 bp, synthetic construct
  misc_feature 1..2595: note = Synthetic
  source 1..2595: mol_type = other DNA
atggctctcgtggattacggcaagcttttcgaggatctgaaccagataagcatgcccctggatcgggtagagttctcagaggtgatggtaatccacaggatgtacttgaggttatctgatctgaatgtgggggagctccccggagccgagagggtgaagcggttgtatgtgtttgcggacgtggtggagctaccagtcgtggaatggcggtggccgccgcaaataccaggatcggtgacggtgatcatattgtgtcgtcttcttcaatggccaactgatgggaggcagtcggacaccgagctccacctgacattcatgaagttgcatgccatacaacgagaggaaaatcggtgggagataaccgcagcagatggcatgaactggggagtttacatacacgcagaggaagtacaggttggcgtgctgacaatgtcatggtcttcggtacttagagtttcggcacttcgctctgttataacctccggctttcgcgccgttagtgtgtttgaggtaccgggaagtgtaaggtccacccttggagctactttaaggcccgatcacgccttatatagtacaactatgcaagccacacccaacgcatcgcatattagtgcttttaaccttcgcatagtttccccgtcggcatatcgtgtttgtcctctccaaaatgacacagatacctacttaggtattccagcagacgtggcggcagttcttccagtagacgtggtgactgatcctaacatcttgctgggcatgcagacaacggtacacattgcggagctagtcaaggcatgtcatccgtcacccgatgttgtgagcgctgtaggggagcacctgaactggctcaacaaactcttactcccacttaaggaatcgactcagttgcaaggaagcgagtcgtacaaggagtgccttgcactcttgggtcgtgttcacgctgcgatgaagatggtgagaattggcttagtagtgccccagctgcaatacagaatgtacggtagcctcatcaaccaaatggcccaggtagcacaaaactacgaccgagaattcaagcaattcaaattattcatcatccaaaatcaaatccttggcagctatttgctgcagcagaacaaggcctttgctgacagagaggtgcagatggagagctttcattcagcggtcatttctcaaagaaggcaggagttggacgacgccatcgctaagatggaccgactgagcttgcagatggaggaagaggacagagcaatggagcaagcccgaaaagaaatggaagaaggattgaagcagttccagaatgagcaagttgcaagggctgtgttcgctgttcttaaatctgtagctatgattgcgctcgcattcgtcacggctggtgcaacggctcctggggctgcagcatctgcagcgcaagctgtgaacatagccggtcaagcggcacaagctctgcgaagggtggtggaaattctagaggggctcgaggctgtgatggaggttgtggctgctataaagcaccttgtggatgctctggaccaggtaagtcagattgtggatgcaccacctatgccagacatgccctcggaggcggactggagtatttttgtgaatgagattgaagccgtggcagaggggatgccgacggaagtctcggaggttccggcgtggaaggccaagtgcaagaatgtggctgcactgggtagggagatgtgcatcacggcagaacagatttcccagctccagtatgacatctgggtgcaaggcttgttgcgggatatagctcaaagccacgcagaccggctggcagcgattcaacctgctaatcttaccaactatttggagatggcaatacagatggatatgcggactacgaggatactgatagggctcctcaacataatgcgcatccagaatgcggcacttatgtatgagtaccttctaacgcccacgcagctcactgcatggccgctgagaatggatactgtggccaacttgctcatcacgcacgagagtgctgcactgtcaggattagctcagttagggcccccatcggacttcacgagcaggcatgtagtgaaaggcatacctgtgagcttgcttctagacggtggggattgggaatttgagattcctgtgcaaggtggcatgtccagtttcccttccagctggactcgagtgcggattcggcacctggagatgcactttgtgcaggaggcgagcggtggcggcgagattatccaccagcctgccacccagacggggaccatttacatcctcctgcagggctccactgtcttccatgatcgcagaagggaggaggtgatgacctttcaggcagcggttccgctcaactaccattacgcgtaccgcctcgacactggagaagccactcttacgaacgagccctcggaacagtttgccaacacattcatgcagatgacaccgttcactcactggaggctacgtctgtctgcgtccgcagcggagaataaaggattagcctttcccacagctacagctcccgactccaccactgagattgccatcactttccatgttacggccattagacaaattgactggcggcaagaggaggag

SEQ ID NO: 727 - DNA, 2601 bp, synthetic construct
  misc_feature 1..2601: note = Synthetic
  source 1..2601: mol_type = other DNA
atggctctcgtggattacggcaagcttttcgaggatctgaaccagataagcatgggtgtactggatcgggtagagttttcagaggtgatggtgatccacaggatgtatgtgaggctagctgatctgaatgtggggcagctccccggagccgagagggtgaagcggttgtatgtgtttgcggacgtggtggagctaccagtcgtggaatggcggtggccgccgcaaataccaggatcggtgacggtgatcattctgtgtcgtcttcttcaatggccaactgatgggaggcagtcggacaccgagctccacctgacattcatgaagttgcatgccatacaacgggaggaaaatcagtgggagataaccgcagcagatggcatgaactggggagtttacatacacgcagaggaagtacaggttggcgtgctgacaatgtcatggtcttcggtacttagagtttcggcacttcgctctgttataacctccggctttcgcgccgttagtgtgtttgaggtaccgggaagtgtaaggtccacccttggagctactttaaggcccgatcacgccttatatagtacaactatgcaagccacacccaacgcatcgcatattagtgcttttaaccttcgcatagtttccccgtcggcatatcgtgtttgtcctctccaaaatgacacagatacctacttaggtattccagcagacgtggcggcagttcttccagtagacgtggtgactgatcctaacatcttgctgggcatgcagacaacggtacacattgcggagctagtcaaggcatgtcatccgtcacccgatgttgtgagcgctgtaggggagcacctgaactggctcaacgaagtcttgctccgagttgtccagaaggaatctcagttgcaagggaccgaggcctacaacgagtgccttgcgcttttaggtcgcattcaatgtgtcatgaagatggggccgtttgtctcggtagtgccgcagctgcaatacagaatgtacggtagcctcatcaaccaaatggcccaagtagcacaaaactacgaccaagatttcaggcaattcaaattattcatcatccaaaatcaaatccttggcagctatttgctgcagcagaacaaggcctttgctgacagagaggtgcagatggagagctttcattcagcggtcatttctcaaagaaggcaggagttggacgacgccatcgctaagatggaccgactgagcttgcagatggaggaagaggacagagcaatggagcaagcccgaaaagaaatggaagaaggattgaagcagttccagaatgagcaagttgcaagggctgtgttcgctgttcttaaatctgtagctatgattgcgctcgcattcgtcacggctggtgcaacggctcctggggctgcagcatctgcagcgcaagctgtgaacatagccggtcaagcggcacaagctctgcgaagggtggtggaaattctagaggggctcgaggctgtgatggaggttgtggctgctataaagcaccttgtggatgctctggaccaggtaagtcagattgtggatgcaccacctatgccagacatgccctcggaggcggactggagtatttttgtgaatgagattgaagccgtggcagaggggatgccgacggaagtctcggaggttccggcgtggaaggccaagtgcaagaatgtggctgcactgggtagggagatgtgcatcacggcagaacagatttcccagctccagtatgacatctgggtgcaaggcttgttgcgggatatagctcaaagccacgcagaccggctggcagcgattcagcctgctaatcttaccaactatttggagatggcaatacagatggatatgcggactacgaggatactgatagggctcctcaacataatgcgcatccagaatgcggcacttatgtatgagtaccttctaacgcccacgcagctcactgcatggccgctgagaatggatactgtggccaacttgctcatcacgcacgagagtgctgcactgtcaggattagctcagttagggcccccatcggacttcacgagcaggcatgtagtgaaaggcatacctgtgagcttgcttctagacggtggggattgggaatttgagattcctgtgcaaggtggcatgtccagtttcccttccagctggactcgagtgcggattcggcacctggagatgcactttgtgcaggaggcgagcggtggcggcgagattatccaccagcctgccacccagacggggaccatttacatcctcctgcagggctccactgtcttccatgatcgcagaagggaggaggtgatgacctttcaggcagcggttccgctcaactaccattacgcgtaccgcctcgacactggagaagccactcttacgaacgagccctcggaacagtttgccaacacattcatgcagatgacaccgttcactcactggaggctacgtctgtctgcgtccgcagcggagaataaaggattagcctttcccacagctacagctcccgactccaccactgagattgccatcactttccatgttacggccattagacaaattgactggcggcaagaggaggag

SEQ ID NO: 728 - protein, 866 aa, synthetic construct
  REGION 1..866: note = Synthetic
MALVDYGKLFEDLNQISMGVLDRVEFSEVMVIHRMYVRLADLNVGQLEGAEKVKRLYVFADVVELPVVEWRWPPQIPGSVTVIILCRLLQWPTDGRQSDTELHLTFMKLHAIQREENRWEITAADGMNWGVYIHAEEVQVGVLTMSWSSVLRVSALRSVITSGFRAVSVFEVPGSVRSTLGATLRPDHALYSTTMQATPNASHISAFNLRIVSPSAYRVCPLQNDTDTYLGIPADVAAVLPVDVVTDPNILLGMQTTVHIAELVKACHPSPDVVSAVGEHLNWLNKLLLPLKESTQLQGTEAYNECLALLGRIQCVMKMGPFVSVVPQLQYRMYGSLIRQMAQVAQNYDQDFRQLKLFIAQNQILGSYLLQQNKAFADREVQMESFHSAVISQRRQELDDAIAKMDRLSLQMEEEDRAMEQARKEMEEGLKQFQNEQVARAVFAVLKSVAMIALAFVTAGATAPGAAASAAQAVNIAGQAAQALRRVVEILEGLEAVMEVVAAIKHLVDALDQVSQIVDAPPMPDMPSEADWSIFVNEIEAVAEGMPTEVSEVPAWKAKCKNVAALGREMCITAEQISQLQYDIWVQGLLRDIAQSHADRLAAIQPANLTNYLEMAIQMDMRTTRILIGLLNIMRIQNAALMYEYLLTPTQLTAWPLRMDTVANLLITHESAALSGLAQLGPPSDFTSRHVVKGIPVSLLLDGGDWEFEIPVQGGMSSFPSSWTRVRIRHLEMHFVQEASGGGEIIHQPATQTGTIYILLQGSTVFHDRRREEVMTFQAAVPLNYHYAYRLDTGEATLTNEPSEQFANTFMQMTPFTHWRLRLSASAAENKGLAFPTATAPDSTTEIAITFHVTAIRQIDWRQEEE

SEQ ID NO: 729 - protein, 866 aa, synthetic construct
  REGION 1..866: note = Synthetic
MALVDYGKLFEDLNQISMGVLDRVEFSEVMVIHRMYVRLADLNVGQLEGAEKVKRLYVFADVVELPVVEWRWPPQIPGSVTVIILCRLLQWPTDGRQSDTELHLTFMKLHAIQREENRWEITAADGMNWGVYIHAEEVQVGVLTMSWSSVLRVSALRSVITSGFRAVSVFEVPGSVRSTLGATLRPDHALYSTTMQATPNASHISAFNLRIVSPSAYRVCPLQNDTDTYLGIPADVAAVLPVDVVTDPNILLGMQTTVHIAELVKACHPSPDVVSAVGEHLNWLNKLLLPLKESTQLQGSESYKECLALLGRVHAAMKMGPFVSVVPQLQYRMYGSLIRQMAQVAQNYDQDFRQLKLFIAQNQILGSYLLQQNKAFADREVQMESFHSAVISQRRQELDDAIAKMDRLSLQMEEEDRAMEQARKEMEEGLKQFQNEQVARAVFAVLKSVAMIALAFVTAGATAPGAAASAAQAVNIAGQAAQALRRVVEILEGLEAVMEVVAAIKHLVDALDQVSQIVDAPPMPDMPSEADWSIFVNEIEAVAEGMPTEVSEVPAWKAKCKNVAALGREMCITAEQISQLQYDIWVQGLLRDIAQSHADRLAAIQPANLTNYLEMAIQMDMRTTRILIGLLNIMRIQNAALMYEYLLTPTQLTAWPLRMDTVANLLITHESAALSGLAQLGPPSDFTSRHVVKGIPVSLLLDGGDWEFEIPVQGGMSSFPSSWTRVRIRHLEMHFVQEASGGGEIIHQPATQTGTIYILLQGSTVFHDRRREEVMTFQAAVPLNYHYAYRLDTGEATLTNEPSEQFANTFMQMTPFTHWRLRLSASAAENKGLAFPTATAPDSTTEIAITFHVTAIRQIDWRQEEE

SEQ ID NO: 730 - protein, 853 aa, synthetic construct
  REGION 1..853: note = Synthetic
MDYSTLYRDLNQISMPLDRVEFSEVMVIHRMYLRLSDLNVGELPGAERVKRLYVLADVVELATFAHPQLLNTRMPGSVTVIILCRLLQFPTDGSFAAWLELPFMELHTLIEQYRSEIKAADDAKWGTYVHAEEVQLSPLFNGWPYLVVEAQRCIITAAMHNTFNRPGWVRSITQFTTDQSGRVDTTLLARTEFGHIDLPLETDSPTAFSVSHRQSTNLPVEYTGIPVEVVTDPNILMGMQTSVHIAELVKACYPSPELVSAVGVHVNWLNEVLLRVVQKESQLQGSESYKECLALLGRVHAAMKMVRIGLVVPQLQYRMYGSLINQMAQVAQNYDREFKQFKLFIIQNQILGSYLLQQNRAFAERELQMESFHAAVISQRREELDNTFAKMDRLSGQMEAESSAMEQAKKEMDEGLRQFQNRQVANALFAVLSAVAQIGLAFLTAGATAPGAVASAGQAVSIAGQAAQGLRRVVEILEQLEAVMEVVAAVKDLVDSLEQVGQIVDAPVMPELPSEADWSIFVNEVEAVAEGMPTEVSEVPVWRAKCKNVAALGREMSITAVQMSELQYDIWVQGMMRDMARSQADRLAAIQPADLTNYLEMATQMDMRTTRMLLGLLNILRIQNAALRYEYLLMPTELTTWPLGMDTVGDLLIAQENAALIGLMQLGPSSDFTSRHVVKDIPVNLLLDGEDWEFEIPVQAGMSSFPSSWSRVRIRHLEMHFVKEASGIGGEIIHQPTTQTGTVYILLQGSTIFHDRRRDQVLPFQAAAPLNYHYAYRLDTGDSTLTNEPSEQFANKFMQMTPFTRWRLRLSASAKENAGLAFPTATALDSTTQIVITFHVTAIRQIDWRHDEE

SEQ ID NO: 731 - protein, 867 aa, synthetic construct
  REGION 1..867: note = Synthetic
MALVDYGKLFEDLNQISMGVLDRVEFSEVMVIHRMYVRLADLNVGQLEGAEKVKRLYVFADVVELPVVEWRWPPQIPGSVTVIILCRLLQWPTDGRQSDTELHLTFMKLHAIQREENRWEITAADGMNWGVYIHAEEVQVGVLTMSWSSVLRVSALRSVITSGFRAVSVFEVPGSVRSTLGATLRPDHALYSTTMQATPNASHISAFNLRIVSPSAYRVCPLQNDTDTYLGIPADVAAVLPVDVVTDPNILLGMQTTVHIAELVKACHPSPDVVSAVGEHVNWLNEVLLRVVQKESQLQGTEAYNECLALLGRIQCVMKMGPFVSVVPQLQYRMYGSLIRQMAQVAQNYDQDFRQLKLFIAQNQILGSYLLQQNKAFADREVQMESFHSAVISQRRQELDDAIAKMDRLSLQMEEEDRAMEQARKEMEEGLKQFQNEQVARAVFAVLKSVAMIALAFVTAGATAPGAAASAAQAVNIAGQAAQALRRVVEILEGLEAVMEVVAAIKHLVDALDQVSQIVDAPPMPDMPSEADWSIFVNEIEAVAEGMPTEVSEVPAWKAKCKNVAALGREMCITAEQISQLQYDIWVQGLLRDIAQSHADRLAAIQPANLTNYLEMAIQMDMRTTRILIGLLNIMRIQNAALMYEYLLTPTQLTAWPLRMDTVANLLITHESAALSGLAQLGPPSDFTSRHVVKGIPVSLLLDGGDWEFEIPVQGGMSSFPSSWTRVRIRHLEMHFVQEASGGGEIIHQPATQTGTIYILLQGSTVFHDRRREEVMTFQAAVPLNYHYAYRLDTGEATLTNEPSEQFANTFMQMTPFTHWRLRLSASAAENKGLAFPTATAPDSTTEIAITFHVTAIRQIDWRQEEE

SEQ ID NO: 732 - protein, 850 aa, synthetic construct
  REGION 1..850: note = Synthetic
MDYSTLYRDLNQISMPLDRVEFSEVMVIHRMYLRLSDLNVGQLEGAERVKRLYVFADVVELPVVEWRWPPQIPGSVTVIILCRLLQFPTDGSFAAWLGLPFMELHTLIEQYRSEIKAADDAKWGTYVHAEEVQLSPLFNGWPYLVVEAQRCIITAAMHNTFNRPGWVRSITQFTTDQSGRVDTTLLARTEFGHIDLPLETDSPTAFSVSHRQSTNLPVEYTGIPVEVVTDPNILMGMQTSVHIAELVKACYPSPELVSAVGVHVNWLNEVLLRVVQKESQLQGTEAYNECLALLGRIQCVMKMGPFVSVVPQLQYRMYGSLIRQMAQVAQNYDQDFRQLKLFIAQNQILGSYLLQQNKAFADREVQMESFHSAVISQRRQELDDAIAKMDRLSLQMEEEDRAMEQARKEMEEGLKQFQNEQVARAVFAVLKSVAMIALAFVTAGATAPGAAASAAQAVNIAGQAAQALRRVVEILEGLEAVMEVVAAIKHLVDALDQVSQIVDAPPMPDMPSEADWSIFVNEIEAVAEGMPTEVSEVPAWKAKCKNVAALGREMCITAEQISQLQYDIWVQGLLRDIAQSHADRLAAIQPANLTNYLEMAIQMDMRTTRILIGLLNIMRIQNAALMYEYLLTPTQLTAWPLRMDTVANLLITHESAALSGLAQLGPPSDFTSRHVVKGIPVSLLLDGGDWEFEIPVQGGMSSFPSSWTRVRIRHLEMHFVQEASGGGEIIHQPATQTGTIYILLQGSTVFHDRRREEVMTFQAAVPLNYHYAYRLDTGEATLTNEPSEQFANTFMQMTPFTHWRLRLSASAAENKGLAFPTATAPDSTTEIAITFHVTAIRQIDWRQEEE

SEQ ID NO: 733 - protein, 863 aa, synthetic construct
  REGION 1..863: note = Synthetic
MDYSTLYRDLNQISMPLDRVEFSEVMVIHRMYLRLSDLNVGELPGAERVKRLYVFADVVELPVVEWRWPPQIPGSVTVIILCRLLQWPTDGRQSDTELHLTFMKLHAIQREENRWEITAADGMNWGVYIHAEEVQVGVLTMSWSSVLRVSALRSVITSGFRAVSVFEVPGSVRSTLGATLRPDHALYSTTMQATPNASHISAFNLRIVSPSAYRVCPLQNDTDTYLGIPADVAAVLPVDVVTDPNILMGMQTSVHIAELVKACHPSPDVVSAVGVHVNWLNEVLLRVVQKESQLQGTEAYNECLALLGRIQCVMKMGPFVSVVPQLQYRMYGSLIRQMAQVAQNYDQDFRQLKLFIAQNQILGSYLLQQNKAFADREVQMESFHSAVISQRRQELDDAIAKMDRLSLQMEEEDRAMEQARKEMEEGLKQFQNEQVARAVFAVLKSVAMIALAFVTAGATAPGAAASAAQAVNIAGQAAQALRRVVEILEGLEAVMEVVAAIKHLVDALDQVSQIVDAPPMPDMPSEADWSIFVNEIEAVAEGMPTEVSEVPAWKAKCKNVAALGREMCITAEQISQLQYDIWVQGLLRDIAQSHADRLAAIQPANLTNYLEMAIQMDMRTTRILIGLLNIMRIQNAALMYEYLLTPTQLTAWPLRMDTVANLLITHESAALSGLAQLGPPSDFTSRHVVKGIPVSLLLDGGDWEFEIPVQGGMSSFPSSWTRVRIRHLEMHFVQEASGGGEIIHQPATQTGTIYILLQGSTVFHDRRREEVMTFQAAVPLNYHYAYRLDTGEATLTNEPSEQFANTFMQMTPFTHWRLRLSASAAENKGLAFPTATAPDSTTEIAITFHVTAIRQIDWRQEEE

SEQ ID NO: 734 - protein, 868 aa, synthetic construct
  REGION 1..868: note = Synthetic
MALVDYGKLFEDLNQISMGVLDRVEFSEVMVIHRMYVRLADLNVGQLEGAEKVKRLYVFADVVELPVVEWRWPPQIPGSVTVIILCRLLQWPTDGRQSDTELHLTFMKLHAIQREENRWEITAADGMNWGVYIHAEEVQVGVLTMSWSSVLRVSALRSVITSGFRAVSVFEVPGSVRSTLGATLRPDHALYSTTMQATPNASHISAFNLRIVSPSAYRVCPLQNDTDTYLGIPADVAAVLPVDVVTDPNILLGMQTTVHIAELVKACHPSPDVVSAVGVHVNWLNEVLLRVVQKESQLQGTEAYNECLALLGRIQCVMKMGPFVSVVPQLQYRMYGSLINQMAQVAQNYDREFKQFKLFIIQNQILGSYLLQQNRAFAERELQMESFHAAVISQRREELDNTFAKMDRLSGQMEAESSAMEQAKKEMDEGLRQFQNRQVANALFAVLSAVAQIGLAFLTAGATAPGAVASAGQAVSIAGQAAQGLRRVVEILEQLEAVMEVVAAVKDLVDSLEQVGQIVDAPVMPELPSEADWSIFVNEVEAVAEGMPTEVSEVPVWRAKCKNVAALGREMSITAVQMSELQYDIWVQGMMRDMARSQADRLAAIQPADLTNYLEMATQMDMRTTRMLLGLLNILRIQNAALRYEYLLMPTELTTWPLGMDTVGDLLIAQENAALIGLMQLGPSSDFTSRHVVKDIPVNLLLDGEDWEFEIPVQAGMSSFPSSWSRVRIRHLEMHFVKEASGIGGEIIHQPTTQTGTVYILLQGSTIFHDRRRDQVLPFQAAAPLNYHYAYRLDTGDSTLTNEPSEQFANKFMQMTPFTRWRLRLSASAKENAGLAFPTATALDSTTQIVITFHVTAIRQIDWRHDEE

SEQ ID NO: 735 - protein, 862 aa, synthetic construct
  REGION 1..862: note = Synthetic
MDYSTLYRDLNQISMPLDRVEFSEVMVIHRMYLRLSDLNVGQLEGAEKVKRLYVFADVVELPVVEWRWPPQIPGSVTVIILCRLLQWPTDGRQSDTELHLTFMKLHAIQREENRWEITAADGMNWGVYIHAEEVQVGVLTMSWSSVLRVSALRSVITSGFRAVSVFEVPGSVRSTLGATLRPDHALYSTTMQATPNASHISAFNLRIVSPSAYRVCPLQNDTDTYLGIPADVAAVLPVDVVTDPNILLGMQTTVHIAELVKACHPSPDVVSAVGEHLNWLNKLLLPLKESTQLQGSESYKECLALLGRVHAAMKMVRIGLVVPQLQYRMYGSLINQMAQVAQNYDREFKQFKLFIIQNQILGSYLLQQNKAFADREVQMESFHSAVISQRRQELDDAIAKMDRLSLQMEEEDRAMEQARKEMEEGLKQFQNEQVARAVFAVLKSVAMIALAFVTAGATAPGAAASAAQAVNIAGQAAQALRRVVEILEGLEAVMEVVAAIKHLVDALDQVSQIVDAPPMPDMPSEADWSIFVNEIEAVAEGMPTEVSEVPAWKAKCKNVAALGREMCITAEQISQLQYDIWVQGLLRDIAQSHADRLAAIQPANLTNYLEMAIQMDMRTTRILIGLLNIMRIQNAALMYEYLLTPTQLTAWPLRMDTVANLLITHESAALSGLAQLGPPSDFTSRHVVKGIPVSLLLDGGDWEFEIPVQGGMSSFPSSWTRVRIRHLEMHFVQEASGGGEIIHQPATQTGTIYILLQGSTVFHDRRREEVMTFQAAVPLNYHYAYRLDTGEATLTNEPSEQFANTFMQMTPFTHWRLRLSASAAENKGLAFPTATAPDSTTEIAITFHVTAIRQIDWRQEEE

SEQ ID NO: 736 - protein, 865 aa, synthetic construct
  REGION 1..865: note = Synthetic
MALVDYGKLFEDLNQISMPLDRVEFSEVMVIHRMYLRLSDLNVGELPGAERVKRLYVFADVVELPVVEWRWPPQIPGSVTVIILCRLLQWPTDGRQSDTELHLTFMKLHAIQREENRWEITAADGMNWGVYIHAEEVQVGVLTMSWSSVLRVSALRSVITSGFRAVSVFEVPGSVRSTLGATLRPDHALYSTTMQATPNASHISAFNLRIVSPSAYRVCPLQNDTDTYLGIPADVAAVLPVDVVTDPNILLGMQTTVHIAELVKACHPSPDVVSAVGEHLNWLNKLLLPLKESTQLQGSESYKECLALLGRVHAAMKMVRIGLVVPQLQYRMYGSLINQMAQVAQNYDREFKQFKLFIIQNQILGSYLLQQNKAFADREVQMESFHSAVISQRRQELDDAIAKMDRLSLQMEEEDRAMEQARKEMEEGLKQFQNEQVARAVFAVLKSVAMIALAFVTAGATAPGAAASAAQAVNIAGQAAQALRRVVEILEGLEAVMEVVAAIKHLVDALDQVSQIVDAPPMPDMPSEADWSIFVNEIEAVAEGMPTEVSEVPAWKAKCKNVAALGREMCITAEQISQLQYDIWVQGLLRDIAQSHADRLAAIQPANLTNYLEMAIQMDMRTTRILIGLLNIMRIQNAALMYEYLLTPTQLTAWPLRMDTVANLLITHESAALSGLAQLGPPSDFTSRHVVKGIPVSLLLDGGDWEFEIPVQGGMSSFPSSWTRVRIRHLEMHFVQEASGGGEIIHQPATQTGTIYILLQGSTVFHDRRREEVMTFQAAVPLNYHYAYRLDTGEATLTNEPSEQFANTFMQMTPFTHWRLRLSASAAENKGLAFPTATAPDSTTEIAITFHVTAIRQIDWRQEEE

SEQ ID NO: 737 - protein, 867 aa, synthetic construct
  REGION 1..867: note = Synthetic
MALVDYGKLFEDLNQISMGVLDRVEFSEVMVIHRMYVRLADLNVGQLPGAERVKRLYVFADVVELPVVEWRWPPQIPGSVTVIILCRLLQWPTDGRQSDTELHLTFMKLHAIQREENQWEITAADGMNWGVYIHAEEVQVGVLTMSWSSVLRVSALRSVITSGFRAVSVFEVPGSVRSTLGATLRPDHALYSTTMQATPNASHISAFNLRIVSPSAYRVCPLQNDTDTYLGIPADVAAVLPVDVVTDPNILLGMQTTVHIAELVKACHPSPDVVSAVGEHLNWLNEVLLRVVQKESQLQGTEAYNECLALLGRIQCVMKMGPFVSVVPQLQYRMYGSLINQMAQVAQNYDQDFRQFKLFIIQNQILGSYLLQQNKAFADREVQMESFHSAVISQRRQELDDAIAKMDRLSLQMEEEDRAMEQARKEMEEGLKQFQNEQVARAVFAVLKSVAMIALAFVTAGATAPGAAASAAQAVNIAGQAAQALRRVVEILEGLEAVMEVVAAIKHLVDALDQVSQIVDAPPMPDMPSEADWSIFVNEIEAVAEGMPTEVSEVPAWKAKCKNVAALGREMCITAEQISQLQYDIWVQGLLRDIAQSHADRLAAIQPANLTNYLEMAIQMDMRTTRILIGLLNIMRIQNAALMYEYLLTPTQLTAWPLRMDTVANLLITHESAALSGLAQLGPPSDFTSRHVVKGIPVSLLLDGGDWEFEIPVQGGMSSFPSSWTRVRIRHLEMHFVQEASGGGEIIHQPATQTGTIYILLQGSTVFHDRRREEVMTFQAAVPLNYHYAYRLDTGEATLTNEPSEQFANTFMQMTPFTHWRLRLSASAAENKGLAFPTATAPDSTTEIAITFHVTAIRQIDWRQEEE

SEQ ID NO: 738 - DNA, 2538 bp, Polystichum tsus-simense
  source 1..2538: mol_type = other DNA
atggattacagcacgctttacagggatctgaaccaggtaagggtgcctgtggatagggcagagttctcagaggtgatggtgatccataggatgtatgtgaggttatctgatctggatgtgggggagctcgttggagccgagagagtgaagcggttgtacgtgtttgcggacgtggtggagcttgttccgcagactgtgtggtttagacaaattcaaatgccaggatcggtgacggtgatcatattgtgtcgtcttcttcaatttccaactgttgggtcgcaagctgaaactctccagctgcccttcatgaggttgcaggccatagtcaaagagcaaaataggtcggagataacagcagcagatgggatgaagtggggaacgtacatacacgggaacgaagtgcagcttcgttctaacaattccagatttgacgtctgggcacctcgctcgattataacctcagccattcacaatgtgctcaacgaacctgggagattagcttccaatactgtaattgcaagggctcagggagcagtgactactacgcgaatgtcagcctggctcagtcatcaaggtttcgtactccccacagtttccccaacggcatttagcgttttacctctccaaagtacgaatgtatccttcacaagtattcctgtggaggttgtcactgatcctaacatcttgctgggcatgcagaccaccctgcacattgcagagctagtcaaggtatgtcacccatcacccgacattgtgagcgctgtagcggagcacgcgatttggctcagcaaagtcttgcttcaagttgtccagaacgaatctcagttgcaagggaccgagtcctacaacgagtgccttgcgctcttgggtcgtgttcaatctgtgataaagatggggagatttggctcagtagtgccccagctgcaataccgaatgtacggcagcctcatcaatcaaatggctcaagtagcacaaaattacgaccgagaattcaagcaattcaagttgttcattatccaaaaccaaatccttggcagctacttgctgcagcagaacaaggcatttgctgacagggagctgcagatggagagctttcattctgcagtcatttctcatagagcccaggagttggacactgccatcgcaaagatggaccgattgagcttgcaaatggaggaagagaatagagcaatggagcaagccgaaaaggaaatgaacgaaggattgaggaggttccagaacgagcaagttgcaagggccatattttcagttcttagagctgtagctatgattgggcttgcatttgtcacgggtggtgcaacggctcctgcagctgtggcatccgcggggcaagctgtgagcatagccggtcaggccgcacaagctctgcgaagggtggtggaaattctagagggcctggcggctgtgatggaggtcgtggctgctgtgaaggaacttgtggcttcattggaacaggtaggtcagattgtggacgcaccggagatgccggacatgccctcggaggcggactggtccatttttgtgaatgagattgaggctgtggcagaggggatgccgacggaagtctcggaggttccgacgtggaaggccaagtgcaagaatgtggctgcactgggtagggagatgagcatcacggcagtacagatttctgagctccagtatcacatctgggtgcaaggcttgatgcgggatatagctcgaagtcaggcagacaggctggcggcgattcaacccgtggaccttacaaactatttggagatggcaacacagatggatatgcggactacgaggatgctgatagggctcctcaacatgctgcgcatccagaatgcggcactcatgtacgagtaccttctaacgcccatggagctcacagcatggccgctggaaatggataccatggccaacttactcatcgagcaggagaattctgcactgttaggattaattcagctagggccctcatcggatttcacaagcaggcatgtggtgaaaggcatacctgtgagcttgctgctcgatggtgaggattgggagtttgagatccctgtgcaacgtggcatgtccagcttcccttttagctggactcgagtccggattcggcacctggagatgcactttgtgcaggaggcgagcagcggcggcgagattatccatcagcctgccacccagacagggaccgtttacatcctcctgcagggctccactatcttccatgaccgcagaagagacgaggtgatgacctttcaggcagcggacccgctcaactaccaatacgcgtaccgtctcgacactggcgaagccacccttaccaacgagccctcagaacagtttgccaacacgttcatgcagatgacacccttcactcggtggaggcttcgtctctctgcgtccgccaaagagaatgcagggttagcctttcccacagctacagctcccgactccactaccgagattgtcatcacgttccacgttacggccattagacaaattgactggaggcaggaggtggaggag

SEQ ID NO: 739 - DNA, 2538 bp, Polystichum tsus-simense
  source 1..2538: mol_type = other DNA
atggattacagcacgctttacagggatctgaaccaggtaagggtgcctgtggatagggcagagttctcagaggtgatggtgatccataggatgtatgtgaggttatctgatctggatgtgggggagctcgttggagccgagagagtgaagcggttgtacgtgtttgcggacgtggtggagcttgttccgcagactgtgtggtttagacaaattcaaatgccaggatcggtgacggtgatcatattgtgtcgtcttcttcaatttccaactgttgggtcgcaagctgaaactctccagctgcccttcatgaggttgcaggccatagtcaaagagcaaaataggtcggagataacagcagcagatgggatgaagtggggaacgtacatacacgggaacgaagtgcagcttcgttctaacaattccagatttgacgtctgggcacctcgctcgattataacctcagccgttcacaatgtgctcaacgaaccggggagattagcttccaatactgtaattgcaagggctcagggagcagtgactactacgcgaatgtcagcctggctcagtcatcaaggtttcgtactccccacagtttccccaacggcatttagcgttttacctctccaaagtacgaatgtatccttcacaagtattcctgtggaggttgtcactgatcctaacatcttgctgggcatgcagaccaccctgcacattgcagagctagtcaaggtatgtcacccatcacccgacattgtgagcgctgtagcggagcacgcgatttggctcagcaaagtcttgcttcaagttgtccagaacgaatctcagttgcaagggaccgagtcctacaacgagtgccttgcgctcttgggtcgtgttcaatctgtgataaagatggggagatttggctcagtagtgccccagctgcaataccgaatgtacggcagcctcatcaatcaaatggctcaagtagcacaaaattacgaccgagaattcaagcaattcaagttgttcattatccaaaaccaaatccttggcagctacttgctgcagcagaacaaggcatttgctgacagggagctgcagatggagagctttcattctgcagtcatttctcatagagcccaggagttggacactgccatcgcaaagatggaccgattgagcttgcaaatggaggaagagaatagagcaatggagcaagccgaaaaggaaatgaacgaaggattgaggaggttccagaacgagcaagttgcaagggccatattttcagttcttagagctgtagctatgattgggcttgcatttgtcacgggtggtgcaacggctcctgcagctgtggcatccgcggggcaagctgtgagcatagccggtcaggccgcacaagctctgcgaagggtggtggaaattctagagggcctggcggctgtgatggaggtcgtggctgctgtgaaggaacttgtggcttcattggaacaggtaggtcagattgtggacgcaccggagatgccggacatgccctcggaggcggactggtccatttttgtgaatgagattgaggctgtggcagaggggatgccgacggaagtctcggaggttccgacgtggaaggccaagtgcaagaatgtggctgcactgggtagggagatgagcatcacggcagtacagatttctgagctccagtatcacatctgggtgcaaggcttgatgcgggatatagctcgaagtcaggcagacaggctggcggcgattcaacccgtggaccttacaaactatttggagatggcaacacagatggatatgcggactacgaggatgctgatagggctcctcaacatgctgcgcatccagaatgcggcactcatgtacgagtaccttctaacgcccatggagctcacagcatggccgctggaaatggataccatggccaacttactcatcgagcaggagaattctgcactgttaggattaattcagctagggccctcatcggatttcacaagcaggcatgtggtgaaaggcatacctgtgagcttgctgctcgatggtgaggattgggagtttgagatccctgtgcaacgtggcatgtccagcttcccttttagctggactcgagtccggattcggcacctggagatgcactttgtgcaggaggcgagcagcggcggcgagattatccatcagcctgccacccagacagggaccgtttacatcctcctgcagggctccactatcttccatgaccgcagaagagacgaggtgatgacctttcaggcagcggacccgctcaactaccaatacgcgtaccgtctcgacactggcgaagccacccttaccaacgagccctcagaacagtttgccaacacgttcatgcagatgacacccttcactcggtggaggcttcgtctctctgcgtccgccaaagagaatgcagggttagcctttcccacagctacagctcccgactccactaccgagattgtcatcacgttccacgttacggccattagacaaattgactggaggcaggaggtggaggag

SEQ ID NO: 740 - DNA, 2673 bp, Polystichum tsus-simense
  source 1..2673: mol_type = other DNA
atgacgatggcggcaattactgcacctcggaagtacagcgagctgtacaaagatttgaaccagataagcgagaggattaggctggatcagatggagttctcggaggtgatggtgatccataggatgtttataaagctggaggagttggacttagggtatctcgaaggagcggagagggtgaagcgcttgtacgtttttgcagatgtggtggaggtggaagaaggtggcaactttattgaggtgggcccattagcgagactgcctgggtcgatcgtggtagtcatactatgccgcgtcctgaaagtgggagtcgtcatgaacaattatctcaataatgccatgcgcgtgcagctcccgcacatgaagttgcgtttggtggaggtcacaacccagcccacaggtactaagctgcacatacatcgtgcagatgcagaagattatcaatatcctgccctctgcatacacgccagtgtcatacaatcttccatccgtctcgcaagcaccaatcgtcctcccacctaccctatccctcttcgattctttacctttatgcccgacagaggatccggagatgttgttttctcctccgaatctcggtccctgattgatgagcctgtcaatatcttctatgtatactcccatatgcctgaatttcgtcgttcactccccgtcccggaggccgccacacttgacccggcctcgctatccgatgattggtattatgttcatcttagccgtgtgaactctgtgatgtcgagctatgttgcggctgaaggagagctggaaccggcattctcactattgaaacccaaaatcccgttcgccgtactaacagatcctaacattttgctcgccatgcagaccagcctccttatcgcggagctagtggagcttgctcacccttcagcagacacagctgatgctgtagccaagcacgtggaatggctcagcaaaatcttgcttcaggctgtgtcgacggatgaggaagggatgttaaatccatctcatgatgagcacctcgcgctcttattccgtgcacaatacctgatgaagatgatgccagggaggacgcgcagcctcgtagtaccacaactgcagtatgacgtttatagcaacctcatcaatcgaatggctcaagtggccgaaagctacgaccaatcactaaggcagtttaaactcttcattgagcaaaacaagattcttggcagctacttgctacaacaaaataaggccttcgctgacagggaaagggatatggatgtttttcattccgagcttatctctcaacggaagattgaactggataacaccttactcaagatggatcaattaagcttacaaatggagactcaaagagaagacatggaccaagccaaaaatgacatggatgccggattgcgggaattccaaaatcgacaagttgcagcagctatgtttgccgtgatcggtgctatcgctgcgattggtcttgcctttgtaactggtggtgccactgctcctgccgccatggtagcagcaaagaccgccgtgacagcagcaggtgcggctgcacgggcgctggagcgagtgatagagatcttggattccttacaagcagtgatggagatggtctctctcataaaggagctggtgagttcgctggaagagataggtcaacttgtggaggcaccagagatgccagagatgccgacagaggcggactggttcatttttgagaacgagatagagggggtggcagagcagatgccaacagaggtgtcggaggtatcggcgtggaagacgaagtgcaagaatgtggcagtgttggggcgggagatgatcactacggcgtcttacatttcggagctgcaatacgacatcaaggtgcagggcatgctgcaggagattgccagaagccatgcgaatcggctgtcgagcatccaggcaacagatctgagcaactatacagagatggtgacacagatggacatgcggaccacacgaatgttggtggcgctcatcaaggtggtgcacatgcagaatgcagcactgatgtaccagtgcctatcaccgcccacatatgtgaatgcatggccagtgacaatggagacagtgtggaccatgctggtgcagcacgagcatgcagcggttctgggattgatgaggctagggccctccttcgatttcatgcgcacgtatgtggtggaggggattcctgtgcagctgctgcttgatggggaggattgggagttcgacattccagtggaagattacacaacgttcccgtccacatggtctcgcgtgcgtattcatcacttggaaatgaagtttgtgcaagccgcagatgtgcatcagcctatcactgatactggcacagtttacatgcttctgcagggctctcgcatcttccgcgaccgcaaccgagccgatgccattcattatgaggctgccatgtcgcttgactaccactatgcctaccgccttgacacaggagagaccaccctctccaatctgccctcccaagattttaccagaactttcatgcgcatgacgcccttcactaactggaggctccgtctgtctgcctctgctgaagaaaacaaagggctccgttttcccacggctacatctgccggctccactacccagattgccgtcattttctatatctcagctatcaggaaaatttctttc

SEQ ID NO: 741 - DNA, 2679 bp, Polystichum tsus-simense
  source 1..2679: mol_type = other DNA
atgacgatggcggcaactgcgcctcgggagtacagcgaactgtacaaggatttgaaccagataagcgagaggattaggctggatcagatggagttctcggaggtgatggtgatccacaggatgtttataaagctggaggagttggacttagggcatctcgaaggagcggagagggtgaagcgcttgtgcgtatttgcagatgtggtggaggtggaagaaggtggcaactttattgacgtggggccagtagcgagattgcctgggtcgatcatggtagtcatactatgccgcgtcctgaaagtcggagtcgtcatgagcgacttttatgtcaataatgccatgcgcctgcagctcccgcacatgaagttgcgtttggtggaggtcacaactcagcccacaggcactaagctgcacatacatcgtgcagatgcagaagattatcaatatcctgccctctgcatacacgccagtgtcatacaatcctccatccgtctcagaagcagctccaataatcgtcctcccaccttccctatccctcttcgattctttaactttaggcccgacagaggatccaacgatgtcgttttctcctccgaatctcggtccctgattgatgagcctgtcaatatcttctatgtatactcccatatgcctgcatttcttcatgcactccccatcccggaggcggccacaattgacccggcctcgctatccagtgattggtattatgtccatctcagccgtgtgaactctgtgttgtcgagctctgttgcggctgaaggagagctggaaccggcattctcactattgaaaccgaaaatcccattcgccgtactaacagatcctaacattttgctcgccatgcagaccagcctccttatcgcagagctagtggagcttgctcacccttcagcagacacagctgatgccgtagccaagcacgtggaatggctcagcaaaatcttgcttcaggctgtgtcgacagatgaggaagggatgttaaatccatctcatgatgagcacctcgcgctcttattccgtgcacaatacctgatgaagatgatgccagggaggacgcgcagcctcgtagtaccacaactgcagtatgacgtttacagcaacctcatcaatcgaatggctcaagtggccgaaagctacgaccaatcactaaggcagtttaaactcttcattgagcaaaacaagattcttggcagctacttgctacaacaaaataaggccttcgctgacagggaaagggatatggatgtttttcattccgagcttatctctcaacggaagattgaactggataacaccttactcaagatggatcaattaagcttacaaatggagactcaaagagaagacatggaccaagccaaaaatgacatggatgccggattgcgggaattccaaaatcgacaagttgcagcagctatgtttgccgtgatcggtgctatcgctgcgattggtcttgcctttgtaaccggtggtgccactgctcctgccgccatggtagcagcaaagaccgccgtgacagcagcgggtgcggctgcacgggcactggagcgagtgatagagatcttggattccttacaagcagtgatggagatggtctctctcataaaggagctggtgagttcgctggaagagataggtcaacttgtggacgcaccagagatgccagagatgccgacagaggcggactggttcatttttgagaacgagatagagggggtggcagagcagatgccaacagaggtgtcggaggtatcggcgtggaaaacgaagtgcaagaatgtggcagtgttggggcgggagatgatcactacggcgtcttatatttcggagctgcaatacgacatcaaggtgcaggcaatgctgcaggagattgccagaagccatgcgaatcggctgtcgagcatccaggcaacagatctgagcaactatacagagatggtgacacagatggacatgcggaccacacgaatgttggtggcgctcatcaaggtggtgcacatgcagaatgcagcactgatgtaccagtgcctatcaccgcccacatatgtgaatgcatggccagtgacaatggagacagtgtggaccatgctggtgcagcacgagcatgcagcggttctgggattgatgaggctagggccctccttcgatttcatgcgcacgtatgtggtggaggggattcctgtgcagctgctgcttgatggggaggattgggagttcgacattccagtggaagattacacaacgttcccgtccacatggtctcgtgtgcgtattcatcacttggaaatgaagtttgtgcaagccgcagatgtgcatcagcctatcactgataccggcacagtttacatgcttctccagggctctcgcatcttccgcgaccgcaaccgagccgatgccattcattacgaggctgccatgtcgcttgactaccactatgcctaccgccttgacacaggagagaccaccctctccaatctgccctcccaagatttcaccagaactttcatgcgcatgacgcccttcacgaactggaggctccgtctgtctgcctctgctgaagaaaacaaagggctccgttttcccacggctacatctgccggctccactacccagattgccgtcattttctatatctcagctatcaggaaaatttctttt

SEQ ID NO: 742 - DNA, 2553 bp, Rumohra adiantiformis
  source 1..2553: mol_type = other DNA
atggattacagcactctttacacggatctgaaccagataagcatgcccctggatcgggtagagttctcagaggtgatggtaatccacaggatgtacttgaggttatctgatctgaatgtgggggagctccccggagccgagagagtgaagcggttgtatgtgtttgcggatgtggtggagctcgcaacatttgcgtatccacagtttcttcatacgcggatgccaggatcggtgacggtgatcattctgtgtcgtcttcttcagtttccaactgatgggtcgttccctgcttggctcgagctgccgttcatggagttacacacactcatagaacaacacaggtcagagataaaagcagcagatgacgcgaactggggaacgtatgtacacgcggaggaagtacagctcagcccgctgtttaatgggtggccttatttggttgttgaggcacagcgctgtattataaccgcggccatgcacaatacatttaaccgcactgggtgggttcgctccgttactcaatttataaatgatcagtccggtcgggtagaaaccacactgctcgcacgaacagaattcggccatatttatctcccactcgagacagattccccaacggcattcagtgtttcacaccgccaaattacgaatttgcccgtagagtacaccggtattccagtagaggtggtgaccgatcctaacatcttgatgggcatgcagactagcgtgcacattgcggagctagtgaaggcatgttacccgtcaccagaattagtgagcgctgtaggggtgcacgtgaattggctcaacgaagtcttgctccgagttgtccagaacgaatctcagttgcaagggaccgaggcctacaacgagtgccttgcgcttttgggtcgcattcaatgtgtcatgaagatggggccgtttgtctcggtagtgccgcagctgcaatacagaatgtatggtagccttatcagacaaatggcccaggtagcacagaactacgaccaagatttcaggcagctcaagttattcattgcccaaaaccaaatccttggcagctatttgctgcagcagaacaaggcatttgctgacagagaggtgcagatggagagctttcattcagcggtcatttctcaaagaaggcaggagttggacgacgccatcgctaagatggaccgactgagcttgcagatggaggaagaggacagagcaatggagcaagcccgaaaagaaatggaagaaggattgaagcagttccagaatgagcaagttgcaagggctgtgttcgctgttcttaaatctgtagctatgattgcgctcgcattcgtcacggctggtgcaacggctcctggggctgcagcatccgcagcgcaagctgtgagcatagccgttcaggccgcacaaggtcttcaaagggtggtggaaattctagaggggctggaggctgtgatggaggttgtggctgctataaaggaccttgtgggtgctctggaccaggtaagtcagattgtggatgcaccacctatgccagacatgccctcggaggcggactggagtatttttgtgaatgagattgaagccgtcgcagaggggatgccgacggaagtctcggaggttccggcgtggaaggccaagtgcaagaatgtggctgcactgggtagggagatgtgcatcacggcagaacagatttcccagctccagtatgacatctgggtgcaaggcttgttgcgggaaatagctcaaagccacgcagaccggctggcagcgattcaacctgctaatcttaccaactatttggagatggcaatacagatggatatgcggactacgaggatactgatagggctcctcaacataatgcgcatccagaatgcggcacttatgtatgagtaccttctaacgcccacgcagctcactgcatggccgctgagaatggatactgtggccaacttgctcatcacgcaggagagtgctgcactgtcaggattagctcagttagggcccccatcggacttcacgagcaggcatgtagtgaaagccatacctgtgagcttgcttctagacggtaaggattgggaatttgagattcctgtgcaaggtggcatgtccagtttcccttccagctggactcgagtgcggattcggcacctggagatgcactttgtgcaggaggcgagcggtggtggcgagattatccaccagcctgccacccagacggggaccgtttacatcctcctgcagggctccactgtcttccatgatcgcagaagggaggaggtgatgacctttcaggcagcggttccgctcaactaccattacgcgtaccgccttgacactggagaagccactcttacgaacgagccctcggaacagtttgccaacacattcatgcagatgacaccgttcactcactggaggctacgtctgtctgcgtccgcagcggagaatgaaggattagcctttcccacagctacagctcccgactccaccactgagattgccatcactttccatgttacggccattagacaaattgactggcggcaagaggag

SEQ ID NO: 743 - DNA, 2553 bp, Rumohra adiantiformis
  source 1..2553: mol_type = other DNA
atggattacagcactctttacacggatctgaaccagataagcatgcccctggatcgggtagagttctcagaggtgatggtaatccacaggatgtacttgaggttatctgatctgaatgtgggggagctccccggagccgagagagtgaagcggttgtatgtgtttgcggatgtggtggagctcgcaacatttgcgtatccacagtttcttcatacgcggatgccaggatcggtgacggtgatcattctgtgtcgtcttcttcagtttccaactgatgggtcgttccctgcttggctcgagctgccgttcatggagttacacacactcatagaacaacacaggtcagagataaaagcagcagatgacgcgaactggggaacgtatgtacacgcggaggaagtacagctcagcccgctgtttaatgggtggccttatttggttgttgaggcacagcgctgtattataaccgcggccatgcacaatacatttaaccgcactgggtgggttcgctccgttactcaatttataaatgatcagtccggtcgggtagaaaccacactgctcgcacgaacagaattcggccatatttatctcccactcgagacagattccccaacggcattcagtgtttcacaccgccaaattacgaatttgcccgtagagtacaccggtattccagtagaggtggtgaccgatcctaacatcttgatgggcatgcagactagcgtgcacattgcggagctagtgaaggcatgttacccgtcaccagaattagtgagcgctgtaggggtgcacgtgaattggctcaacgaagtcttgctccgagttgtccagaacgaatctcagttgcaagggaccgaggcctacaacgagtgccttgcgcttttgggtcgcattcaatgtgtcatgaagatggggccgtttgtctcggtagtgccgcagctgcaatacagaatgtatggtagccttatcagacaaatggcccaggtagcacagaactacgaccaagatttcaggcagctcaagttattcattgcccaaaaccaaatccttggcagctatttgctgcagcagaacaaggcatttgctgacagagaggtgcagatggagagctttcattcagcggtcatttctcaaagaaggcaggagttggacgacgccatcgctaagatggaccgactgagcttgcagatggaggaagaggacagagcaatggagcaagcccgaaaagaaatggaagaaggattgaagcagttccagaatgagcaagttgcaagggctgtgttcgctgttcttaaatctgtagctatgattgcgctcgcattcgtcacggctggtgcaacggctcctggggctgcagcatccgcagcgcaagctgtgagcatagccggtcaggccgcacaaggtcttcaaagggtggtggaaattctagaggggctggaggctgtgatggaggttgtggctgctataaaggaccttgtgggtgctctggaccaggtaagtcagattgtggatgcaccacctatgccagacatgccctcggaggcggactggagtatttttgtgaatgagattgaagccgtcgcagaggggatgccgacggaagtctcggaggttccggcgtggaaggccaagtgcaagaatgtggctgcactgggtagggagatgtgcatcacggcagaacagatttcccagctccagtatgacatctgggtgcaaggcttgttgcgggaaatagctcaaagccacgcagaccggctggcagcgattcaacctgctaatcttaccaactatttggagatggcaatacagatggatatgcggactacgaggatactgatagggctcctcaacataatgcgcatccagaatgcggcacttatgtatgagtaccttctaacgcccacgcagctcactgcatggccgctgagaatggatactgtggccaacttgctcatcacgcaggagagtgctgcactgtcaggattagctcagttagggcccccatcggacttcacgagcaggcatgtagtgaaagccatacctgtgagcttgcttctagacggtaaggattgggaatttgagattcctgtgcaaggtggcatgtccagtttcccttccagctggactcgagtgcggattcggcacctggagatgcactttgtgcaggaggcgagcggtggtggcgagattatccaccagcctgccacccagacggggaccgtttacatcctcctgcagggctccactgtcttccatgatcgcagaagggaggaggtgatgacctttcaggcagcggttccgctcaactaccattacgcgtaccgccttgacactggagaagccactcttacgaacgagccctcggaacagtttgccaacacattcatgcagatgacaccgttcactcactggaggctacgtctgtctgcgtccgcagcggagaatgaaggattagcctttcccacagctacagctcccgactccaccactgagattgccatcactttccatgttacggccattagacaaattgactggcggcaagaggag

SEQ ID NO: 744 - DNA, 2703 bp, Rumohra adiantiformis
  source 1..2703: mol_type = other DNA
atggctgcctccgctgctgctattcccgactacaaggagctgtacagagatttgaaccagataagtgagaggatgaggctggatcagatggatttctcggaggtgatggtgatccaccgcatgtatataaggctggaggagctagacttggggcatctggagggagccgacaaggtgaagcgcttgtacgtgcttgcagatgtggtggaggtggaagaaggtggcaacttcattgagcaagggcctgtagcaagattaccaggctccatcttggttgtcatactctgtagagtcctgcttgtgggcatcgtcatcaacgtgcatagtaatggtgaaaattttaataatgccatgcgcctccagcttccacacttgaagctgcgcgcggtcgagatcagcagcagcaccgacagcaactttaagctggagatgcatcgtgttgatcagacagcaggcgagtacaaccaatatcctgcccttaccgtaaacgcggatcttgtacagtgccgcatgcggtgggttattcatcgaccaccgatcacttccgtcagtttgtctcctatattcgtcgcttttatgccagaccgaggatctggagacgtcatcttttcctccgagtctcggtccatggttgatcgacctgttcagatgttttctgtctactctcacgtccctcgttttattcaaagccgtcccctcccactcccagaggaggtcacaatagacctgtcatcatgggagcccaaggaattttactctctctttgtcagtacagctcccacagtttctttgagcaaaagtgaagcagtagcaggagacctggagccagcgttctcgatattgaaaagaactgttcctgttgtcgtgctgacagatcccaacattttactggccatgcaggccagcctacttatcgcggaactagtgcagattgctcacccttcaccagacacagctgatgctgtagccaagcatgtggaatggctcaacaagctcttgattcaggcggcatcagacacggagggcactccagctcatcacgagtacctggcgctcttgttccgtgcacagtacgtcatgaagaagataggaaggacacgtcacctcgtagtgccgcaattgcaatacgacgtttatagtggtctcatcaatcgaatggctcaagtagctgagagttatgaccaatcactcaggcaatttaaactcttcattcaacaaaacaagattcttgggagctatctgctacagcaaaacagggcctttgctgacaaggaaagggacatggatgtattttattccgagcttatctctcaaagggaggttgaattgcaaagcaccctactaaaaatggatcaactgagctcacagatggagacacaacgcgaagacatggagcaagcgcaaaaagagatggaggaaggattgcgaagattccaaaatagagcagttgcaaatgctatgtttgccgtaattggagctgtggctgcaattggtcttgcattcctaaccggtggtgcaactgctcccggagctatggcagcagcagggaatgctgtgacggcagcgggtcaggctgccagggcgctgcaaagagtgctagatattttggaaggcttgcaagtagtgatggaagtgctgtctattatcaaggaactagtcgcttctttgcaagatctaggtcagcttgtggatgcacccgagatgccggaaatgccactggagtcggactggtacatttttgagaactctattgaggaagtggcggaggggatgccggaggaagtgtcagaggtaacggcatggaagaccaagtgcaagaatgtggcggtgctgggccgagagatgatcaccactgcagtatacatatcgcagctaatgtatgatatcaaggtgcagggcatgctgcaggagattgccaaaagccatgcgcaacggttggagaacatccaagcagcggatctgcaaggctatacagagatggtgacacagatggacatgcggaccacgcgcatgttggtggaactgatcaaggtggtgtatatgcagaatgcagcgcttatgtaccagagtttatcaccacccacagcagtgaatgcatggcccgtgacgatggagacagtgtggagcattctactgcagcatgaccatgctgctttgctggggttgctgaggctagggccttcctttgatttcatgcgcacctacacggtggaggatgttccggtgagcctgttgcttgatggtgaagactggcaattcgagatccctgtgcgagattacacagtctttccctccacctggtcgcgcgtgcgcattcatcacttggagatgaaatttgtcaaagctgctcatgtccaccagcccatcactgatacaggctccatttacgtgcttctgcagggctcgcgcatcttccgcgatcgcaacgaagatgaaaccattgattatgaggctgccctgccgcttgactaccactacgcctaccgccttgacacaggggagaccaccctttccaatctgccctctcaagaattcaccaagaccttcttgcgcatgacgcccttctccaacgcctggagattacgtctgtcttcctctgctgaagaaaacaaagggctggcctttcccactgctacggctgccgactccactacccagattgctatcaccttctacgtcaccgctatccggcgcatttctttc

SEQ ID NO: 745 - DNA, 2703 bp, Rumohra adiantiformis
  source 1..2703: mol_type = other DNA
atggctgcctccgctgctgctattcccgactacaaggagctgtacagagatttgaaccagataagtgagaggatgaggctggatcagatggatttctcggaggtgatggtgatccaccgcatgtatataaggctggaggagctagacttggggcatctggagggagccgacaaggtgaagcgcttgtacgtgcttgcagatgtggtggaggtggaagaaggtggcaacttcattgagcaagggcctgtagcaagattaccaggctccatcttggttgtcatactctgtagagtcctgcttgtgggcatcgtcatcaacgtgcatagtaatggtgaaaattttaataatgccatgcgcctccagcttccacacttgaagctgcgcgcggtcgagatcagcagcagcaccgacagcaactttaagctggagatgcatcgtgttgatcagacagcaggcgagtacaaccaatatcctgcccttaccgtaaacgcggatcttgtacagtgccgcatgcggtgggttattcatcgaccaccgatcacttccgtcagtttgtctcctagattcgtcgcttttatgccagaccgaggatctggagacgtcatcttttcctccgagtctcggtccatggttgatcgacctgttcagatgttttctgtctactctcacgtccctcgttttattcaaagccgtcccctcccactcccagaggaggtcacaatagacctgtcatcatgggagcccaaggaattttactctctctttgtcagtacagctcccacagtttctttgagcaaaagtgaagcagtagcaggagacctggagccagcgttctcgatattgaaaagaactgttcctgttgtcgtgctgacagatcccaacattttactggccatgcaggccagcctacttatcgcggaactagtgcagattgctcacccttcaccagacacagctgatgctgtagccaagcatgtggaatggctcaacaagctcttgattcaggcggcatcagacacggagggcactccagctcatcacgagtacctggcgctcttgttccgtgcacagtacgtcatgaagaagataggaaggacacgtcacctcgtagtgccgcaattgcaatacgacgtttatagtggtctcatcaatcgaatggctcaagtagctgagagttatgaccaatcactcaggcaatttaaactcttcattcaacaaaacaagattcttgggagctatctgctacagcaaaacagggcctttgctgacaaggaaagggacatggatgtattttattccgagcttatctctcaaagggaggttgaattgcaaagcaccctactaaaaatggatcaactgagctcacagatggagacacaacgcgaagacatggagcaagcgcaaaaagagatggaggaaggattgcgaagattccaaaatagagcagttgcaaatgctatgtttgccgtaattggagctgtggctgcaattggtcttgcattcctaaccggtggtgcaactgctcccggagctatggcagcagcagggaatgctgtgacggcagcgggtcaggctgccagggcgctgcaaagagtgctagatattttggaaggcttgcaagtagtgatggaagtgctgtctattatcaaggaactagtcgcttctttgcaagatctaggtcagcttgtggatgcacccgagatgccggaaatgccactggagtcggactggtacatttttgagaactctattgaggaagtggcggaggggatgccggaggaagtgtcagaggtaacggcatggaagaccaagtgcaagaatgtggcggtgctgggccgagagatgatcaccactgcagtatacatatcgcagctaatgtatgatatcaaggtgcagggcatgctgcaggagattgccaaaagccatgcgcaacggttggagaacatccaagcagcggatctgcaaggctatacagagatggtgacacagatggacatgcggaccacgcgcatgttggtggaactgatcaaggtggtgtatatgcagaatgcagcgcttatgtaccagagtttatcaccacccacagcagtgaatgcatggcccgtgacgatggagacagtgtggagcattctactgcagcatgaccatgctgctttgctggggttgctgaggctagggccttcctttgatttcatgcgcacctacacggtggaggatgttccggtgagcctgttgcttgatggtgaagactggcaattcgagatccctgtgcgagattacacagtctttccctccacctggtcgcgcgtgcgcattcatcacttggagatgaaatttgtcaaagctgctcatgtccaccagcccatcactgatacaggctccatttacgtgcttctgcagggctcgcgcatcttccgcgatcgcaacgaagatgaaaccattgattatgaggctgccctgccgcttgactaccactacgcctaccgccttgacacaggggagaccaccctttccaatctgccctctcaagaattcaccaagaccttcttgcgcatgacgcccttctccaacgcctggagattacgtctgtcttcctctgctgaagaaaacaaagggctggcctttcccactgctacggctgccgactccactacccagattgctatcaccttctacgtcaccgctatccggcgcatttctttc

SEQ ID NO: 746 - DNA, 2559 bp, Asplenium trichomanes
  source 1..2559: mol_type = other DNA
atggattacagcacgctttacagggatctgaaccagataagcatgcctgtggatcacgtagagttctcagaggtgatggtgatccatagaatgtatgtgaggttatctgatctggatgtgggggagctcgctggagcagagaaagtgaagcggctgtacttgtttgccgatgtggtggagcttgcaccggagcttgcaccggggaaacggacgcaaatgccaggatcgatcacggtgatcatattgtgtcgtcttcttcaatttccaactgatgggtcgcgagctgcaactctccagctgccgttcatgaagttgcatgccatactcagagagcgatataggtcagagataacagcagcagatggcacgaattggggaacgtacatccacggagacgaagtacaggtcagcccgctgtatactaacaattcggtacttccggtttgggcagatcgctctattataacctcagcctttcacaatgtgcttgacgaacctggtagagtaatttccagtactagtattacaatggctcaggcagcaccgaataatacgcgtatgacagccgaacccggttgggtctttggtaatcgttttctactctacacagtttcttcgacggcattcagtgttttacctctccaaagtacgaatatatccttcacaagcattccggtagaggtggtggctgatcctaacatcttgctgggcatgcagaccactgtgcacattgctgagctagtcaaggcatgtcgcccgtcacccgacatagtgagcgctgtagggcagcacgtgatttggctcaacaaagtcttgctccatgttgtgcagaacgaatctcagttgcaagggaccgaatcctacaacgagtgccttgcacttttgggtcgtgttcaatctgtgatgaagatcggcagatctggctcagtagtgccccagctgcaatacagaatgtatggtagcctcatcaaacaaatggcccaagcagcacaaaactatgaccaagaattcaggcagttcaagttattcatcatccaaaaccaaatcctgggcagctatttgctgcagcagaacaaggcatttgccgacagggagctgcagatggagagctttcattcagcggtcatttctcaaagaatgcaggagttggacactgccatcgcaaagatggaccgattgagcttgcaaatggaggaagagaacaaagcaatggagcaagcccagagggagatggacgaaggattgaggaggttccggaatgaacaagtcgcaagggccgtattttctgttcttagagctgtagctatgattgccctcgcattcgtcacgggtggtgcaacggctcctggagctgcggcgtccgcggggcaagccgtgagcatagcaggtcaggccgcacaagctctgcaaagggtggtggaaattctagatcggctggaggcggtgatggaggttgtggctgctgtgaaggaccttgtggattcattggaacaggtaggtcagattgtggaggcaccggtgatgccggacatgccctcggaggcggactggtccatttttgtgaatgagatcgaggctgtcgcagaggggatgccgacagaagtctcggaggttccggcgtggaaggccaagtgcaagaatgtggctgcactgggtagggagatgagcatcacggcagtacagatttctgagctccagtatgacatctgggtgcacggcttgatgcgggacatggctcgaagtcaggcagacaggctggcggcaattcaacccgcagaccttaccaactatttggagatggcaacacagatggatatgcggactacaaggatgctactagggctgctcaacatgctgcacatccagaatgcggcactcatgtacgagtaccttctgacgcccacagagctcacagcatggccgctgggcatggatatcgtggccaacttgctcatcgcgcaggagaatgctgcactgttaggattagttcagctagggcccccatcggatttcacgagcaagcatgtggtgaaaggcatacctgtgagcttgctgctcgacggtgaggattgggagttcgagatccctgtggaaggtggcatgtccagcttcccttctagctggactcgcgtacggattcggcacctggagatgcactttgtgcaggagatgagcggtggcagcgagattatccaccagcctgccacccagacggggactgtttacatcctcctgcagggctccactaccttccatgaccgcagaagggacgaggtgatgacctttcaggcagcggctccgctcaactaccattacgcgtaccgccttgacactggcgaagccactcttacgaacgagccctcggaacagtttgccaacacattcatgcagatgacacccttcacgcgctggaggcttcgtctctctgcgtctgccgcagagaatgcaggattaggctttcccacagctacagctcccgactccacgaccgagatagtcatcacgttccatgttacggccattagacaaattgactggcggcacgaggaggaggaggag

SEQ ID NO: 747 - DNA, 2481 bp, Asplenium trichomanes
  source 1..2481: mol_type = other DNA
atggattacagcacgctttacagggatctgaaccagataagcatgcctgtggatcacgtagagttctcagaggtgatggtgatccatagaatgtatgtgaggttatctgatctggatgtgggggagctcgctggagcagagaaagtgaagcggctgtacttgtttgccgatgtggtggagcttgcaccggagcttgcaccggggaaacggacgcaaatgccaggatcgatcacggtgatcatattgtgtcgtcttcttcaatttccaactgatgggtcgcgagctgcaactctccagctgccgttcatgaagttgcatgccatactcagagagcgatataggtcagagataacagcagcagatggcacgaattggggaacgtacatccacggagacgaagtacaggtcagcccgctgtatactaacaattcggtacttccggtttgggcagatcgctctattataacctcagcctttcacaatgtgcttgacgaacctggtagagtaatttccagtactagtattacaatggctcaggcagcaccgaataatacgcgtatgacagccgaacccggttgggtctttggtaatcgttttctactctacacagtttcttcgacggcattcagtgttttacctctccaaagtacgaatatatccttcacaagcattccggtagaggtggtggctgatcctaacatcttgctgggcatgcagaccactgtgcacattgctgagctagtcaaggtgcagaacgaatctcagttgcaagggaccgaatcctacaacgagtgccttgcacttttgggtcgtgttcaatctgtgatgaagatcggcagatctggctcagtagtgccccagctgcaatacagaatgtatggtagcctcatcaaacaaatggcccaagcagcacaaaactatgaccaagaattcaggcagttcaagttattcatcatccaaaaccaaatcctgggcagctatttgctgcagcagaacaaggcatttgccgacagggagctgcagatggagagctttcattcagcggtcatttctcaaagaatgcaggagttggacactgccatcgcaaagatggaccgattgagcttgcaaatggaggaagagaacaaagcaatggagcaagcccagagggagatggacgaaggattgaggaggttccggaatgaacaagtcgcaagggccgtattttctgttcttagagctgtagctatgattgccctcgcattcgtcacgggtggtgcaacggctcctggagctgcggcgtccgcggggcaagccgtgagcatagcaggtcaggccgcacaagctctgcaaagggtggtggaaattctagatcggctggaggcggtgatggaggttgtggctgctgtgaaggaccttgtggattcattggaacaggtaggtcagattgtggaggcaccggtgatgccggacatgccctcggaggcggactggtccatttttgtgaatgagatcgaggctgtcgcagaggggatgccgacagaagtctcggaggttccggcgtggaaggccaagtgcaagaatgtggctgcactgggtagggagatgagcatcacggcagtacagatttctgagctccagtatgacatctgggtgcacggcttgatgcgggacatggctcgaagccaggcagacaggctggcggcaattcaacccgcagaccttaccaactatttggagatggcaacacagatggatatgcggactacaaggatgctactagggctgctcaacatgctgcacatccagaatgcggcactcatgtacgagtaccttctgacgcccacagagctcacagcatggccgctgggcatggatatcgtggccaacttgctcatcgcgcaggagaatgctgcactgttaggattagttcagctagggcccccatcggatttcacgagcaagcatgtggtgaaaggcatacctgtgagcttgctgctcgacggtgaggattgggagttcgagatccctgtggaaggtggcatgtccagcttcccttctagctggactcgcgtacggattcggcacctggagatgcactttgtgcaggagatgagcggtggcagcgagattatccaccagcctgccacccagacggggactgtttacatcctcctgcagggctccactaccttccatgaccgcagaagggacgaggtgatgacctttcaggcagcggctccgctcaactaccattacgcgtaccgccttgacactggcgaagccactcttacgaacgagccctcggaacagtttgccaacacattcatgcagatgacacccttcacgcgctggaggcttcgtctctctgcgtctgccgcagagaatgcaggattaggctttcccacagctacagctcccgactccacgaccgagatagtcatcacgttccatgttacggccattagacaaattgactggcggcacgaggaggaggaggag

SEQ ID NO: 748 - DNA, 2712 bp, Asplenium scolopendrium
  source 1..2712: mol_type = other DNA
atgggtgtcacagtcgttagcgacgagctgtgtctgctggacttggacgaagggagcgaggaatgggtgaaggatgaggaggcgataaaggcagcgaggagtagtacacctgaggtgaactacgaggccctgtatgcgaatgcaaaccagatagcgcgcgacctgcgagtggggagtgtgccatgtggagagctcctttctgtcaacggccggatgtttgtgcggctggacagcctggatgtgagccggctgcggcaacccgagcgagtgcagaacctcattgtgctggcagacgttgtggagatttctggcagggatctggtgctcccgggcgcctcctccgtgcgcatcatctgccggatcctccatctcagaagccgagacgtgcagctggaccttccttacgcgtggcgcacttcttcacaaacccagccctttcaattctccctccgtgcgcagcaaattgtcgtgtcgccctctgctgcgcctcccagcctttcctctactggtgccttagtggttcggctgcaccgcgagttaaatcaatgggctaccacaagaaccaggttcactcaatatgtcgtccgatgctttggctacacggcaagtagtgtaaactctaccgtcaatatcaacatccctgtctcagcagagacgccaccatcctttcactggctccgtgtgaactccgagaatctgaacctcaaggtcaaccaggatgctgtgtggcgtgcccatgtcgacgtccaggttgcgttgccgtcacagctggatctcaatgacctgcatgtcatgatgggtatggagtctaccctgctgactgcagagatgattcttagctatcgatcagatcgcccggacgttgttgctctggcagtagagcatgttgaatggatcagaatgagcttggtgcagaatcatgagcaacaacctaatcttcctgacaaccaatttgcactacttgctcgagcggaaatgcttgcaaaattgtcgatagatggaagccaaagcctggttgtcccgcagcttgagtacaccgcgtacagcgaagtgatcagacaaatcgctgttgtggccgaagcatacaatcaggaattcacacagctgcatctctttgtacaacaaactacgatacttggtgactatgttctcaatacagtgaaagctcttgctgagaaggagaaagacatcgccctcctggaggaggctgttgtgcgtggcaagcagtccgagctcgacattgccgtcgagaaaatagagaggttagagcaacaaatcctgaagcaaattgaagaggtgcaagaagccaaggaagacatggagaaaggtatcatcgcatacaggaatcggctgatcgcaaatgccttctttgaagtcctcagtgctgtcctacaaattgcagggtcatttgtgtattttaagacaggccaaattactgatgggctagcagcattgggaggaggtctcgcatccgcaaatcaggcaatctggctgatagtggatgcagtagacgcaaaaaattcactaagcaacatcaccgacaacctggtcgatgtggaaaaggcaatgaaagtggtgaacgctgtgctcgcattggtggataccgtcacaaacctggatgagctcttggatgctccacggatgcctgacgttgactcctcacattgggacatcatggagaacgagatcgagatagtggcagcgcaactgcccaccgaggtcagcgaggtccgggtgtggagcctcaaatgcaggaacgtggtgatcgtgtgccgtgaggtttgcacaactgctgctgccataatgcagctgcaatacgagctctttgtgcatgcaaggaagaaagagatttctgaaaggcatgcggagcgcttggcgcagatccaagcggtagacctgggggactacttggagctggcaagccaggctgacatgcgcacggtgcgactgctcatacagctactggacctgctggctacccagaacggagctctgcaatatcactacctactgccaccggagccattcgttggctggcctaccatagacaatgtgaggagaatgctggtggcacggcagcaacaagctgtcatttcacaaaccagcctaggtccgtcctaccgtgtcaggacacgcttggtgctcgattctgtccccgtgggcttgctactctctggtgaggactatagcttcacaatcgcgccgatcagcgagcaaagcatcccggtcttccccgctgtctggtcgcgtgtgcgcatcgaagagttgcaaatggtgttcactgccggtactacaggggcgcacatgccagtggctggtcccggcggcaaggtctacttactattacagccatcgtctacgttccacgatcggctgcgctaccaggccttcaactaccaggcggctgctccacggccgttccagtatgtatatgaccttgcgaccggcgagccatcgctggtgagcaggcccagtgagccaggcctctttctgcgcatgacaccgttcacacgctggaggcttcggctttcggcctccgcgtaccagaacgaagggatctccttccccaccgccactgcagccgacagcgtggccgaaatcaccatcaccttcgagcttacggctattgtccatccacaatcttttctcgaggaggatggcatcacgttcctcatgccgggcaagggtggcgatgatcaggtcgtcagctaa

SEQ ID NO: 749 - DNA, 2712 bp, Asplenium scolopendrium
  source 1..2712: mol_type = other DNA
atgggtgtcacagtcgttagcgacgagctgtgtctgctggacttggacgaagggagcgaggaatgggtgaaggatgaggaggcgataaaggcagcgaggagtagtacacctgaggtgaactacgaggccctgtatgcgaatgcaaaccagatagcgcgcgacctgcgagtggggagtgtgccatgtggagagctcctttctgtcaacggccggatgtttgtgcggctggacagcctggatgtgagccggctgcggcaacccgagcgagtgcagaacctcattgtgctggcagacgttgtggagatttctggcagggatctggtgctcccgggcgcctcctccgtgcgcatcatctgccggatcctccatctcagaagccgagacgtgcagctggaccttccttacgcgtggcgcacttcttcacaaacccagccctttcaattctccctccgtgcgcagcaaattgtcgtgtcgccctctgctgcgcctcccagcctttcctctactggtgccttagtggttcggctgcaccgcgagttaaatcaatgggctaccacaagaaccaggttcactcaatatgtcgtccgatgctttggctacacggcaagtagtgtaaactctaccgtcaatatcaacatccctgtctcagcagagacgccaccatcctttcactggctccgtgtgaactccgagaatctgaacctcaaggtcaaccaggatgctgtgtggcgtgcccatgtcgacgtccaggttgcgttgccgtcacagctggatctcaatgacctgcatgtcatgatgggtatggagtctaccctgctgactgcagagatgattcttagctatcgatcagatcgcccggacgttgttgctctggcagtagagcatgttgaatggatcagaatgagcttggtgcagaatcatgagcaacaacctaatcttcctgacaaccaatttgcactacttgctcgagcggaaatgcttgcaaaattgtcgatagatggaagccaaagcctggttgtcccgcagcttgagtacaccgcgtacagcgaagtgatcagacaaatcgctgttgtggccgaagcatacaatcaggaattcacacagctgcatctctttgtacaacaaactacgatacttggtgactatgttctcaatacagtgaaagctcttgctgagaaggagaaagacatcgccctcctggaggaggctgttgtgcgtggcaagcagtccgagctcgacattgccgtcgagaaaatagagaggttagagcaacaaatcctgaagcaaattgaagaggtgcaagaagccaaggaagacatggagaaaggtatcatcgcatacaggaatcggctgatcgcaaatgccttctttgaagtcctcagtgctgtcctacaaattgcagggtcatttgtgtattttaagacaggccaaattactgatgggctagcagcattgggaggaggtctcgcatccgcaaatcaggcaatctggctgatagtggatgcagtagacgcaaaaaattcactaagcaacatcaccgacaacctggtcgatgtggaaaaggcaatgaaagtggtgaacgctgtgctcgcattggtggataccgtcacaaacctggatgagctcttggatgctccacggatgcctgacgttgactcctcacattgggacatcatggagaacgagatcgagatagtggcagcgcaactgcccaccgaggtcagcgaggtccgggtgtggagcctcaaatgcaggaacgtggtgatcgtgtgccgtgaggtttgcacaactgctgctgccataatgcagctgcaatacgagctctttgtgcatgcaaggaagaaagagatttctgaaaggcatgcggagcgcttggcgcagatccaagcggtagacctgggggactacttggagctggcaagccaggctgacatgcgcacggtgcgactgctcatacagctactggacctgctggctacccagaacggagctctgcaatatcactacctactgccaccggagccattcgttggctggcctaccatagacaatgtgaggagaatgctggtggcacggcagcaacaagctgtcatttcacaaaccagcctaggtccgtcctaccgtgtcaggacacgcttggtgctcgattctgtccccgtgggcttgctactctctggtgaggactatagcttcacaatcgcgccgatcagcgagcaaagcatcccggtcttccccgctgtctggtcgcgtgtgcgcatcgaagagttgcaaatggtgttcactgccggtactacaggggcgcacatgccagtggctggtcccggcggcaaggtctacttactattacagccatcgtctacgttccacgatcggctgcgctaccaggtcttcaactaccaggcggctgctccacggccgttccagtatgtatatgaccttgcgaccggcgagccatcgctggtgagcaggcccagtgagccaggcctctttctgcgcatgacaccgttcacacgctggaggcttcggctttcggcctccgcgtaccagaacgaagggatctccttccccaccgccactgcagccgacagcgtggccgaaatcaccatcaccttcgagcttacggctattgtccatccacaatcttttctcgaggaggatggcatcacgttcctcatgccgggcaagggtggcgatgatcaggtcgtcagctaa

SEQ ID NO: 750 - DNA, 2628 bp, Asplenium scolopendrium
  source 1..2628: mol_type = other DNA
atggagtatggcagcttgtatggtgatgtgaaccaggtgagcctgaggttcgagaatacggaggtctctgaggtgatggtggtgcatcggatgcatgtgcggctggaggagctggacatgagcaacgacaagctcaaacgcctgtacgtgctggcggacgtggtggagctgccttcccagcgtaaaactatcgttatccccgccaccgtttcggcgataatcatgtgccgtgttctctacatcccttacatctggaccgtgtttgacaactgcaccgtcctcctcccgcacatgcgcttccgggtcgtcgaaacaagcctcacgctcagaactggccaattctttgccttaccctcctctgacaccgtcgacaacggcgccggcagctttggcggcctctacatccatgccgaccgcttcatctaccgccaggccacatcgtttacctccgactgggtccagcctctgcaacttcgggtacgaggcagctccaccttctcctcaaccttccgtgatcctgactggccagaaaccctacctgtcaccaacctcaatcaaaccatcaccctctccttgggctcattcctcacaccctccgactctgacttgcagagatctgacgagattgagttcctgcagacggagccccagagagtgcaagtggtatttaaccgacccggcggcacgaccggcgtggctttactcgtcgagaactcccctgaaatcagctttttccctgcaccatcgctggaacatgtccctgcagacgtcctcgccgatccttccatcatcttgggcatgcaaatgaacatgctcagtgccgagcttgtccgggctgctcacaattcgcagcaagtcatcaaagctgtcactaagcatgtggaatggctcagcaagatcttgcttcaggttgcttcaccgagtgatgacattctagcgctcttgtttcgcgtgcaagcattcattaagatggcaaagcaatcgcgctttgtggttccacggttacaataccacgtgtacagtaaccttatcaatcggatggtgcaagtagcccaggattatgaccaggagttcaggcaactcagacttttcattgcacaaaatgagatattgggaagctatttgctacagcaaaataaggctttcgcagataaggagaaggacatgagtgctttccactcgcaagttgtgtctatgaggagatccgagctgacctctaccatagaaatgatgggcaggctgagcttgcaaatggaaacggagggtgaggcgatggacgaagccagggacagtatggtcgaagcaattcaagaatatgaaaggaaacaacttgcaagggctctatttgcagtgcttggggcaatagcaagtgttgctcttgcatttgccactggaggtgcaactgcaccagcggcagtggcagcagctggagcggcagtcactgcagcaggtagattggcagaaggcctccgaagggttgtggagatcctcgaaggcttgcaagcgatcatggaggttgtggcagctataagagatctcgtagaatcactggaaaacatgggtcaactagtaggagctccggaaatgccagagatgcctacaaatgcagactggttaatttttgtaaatgaggtggaggcagtggcagagcaagtgccagaagaagtgtcagaggtcccagtgtggaaggccaagtgcaagaatgtggcggtgctagggcaagagatgtgcacaacagcagcacatattagcgagctacagtatcagataagggtggaagagatgctacaggagattgcacaacgtcaagcagacaggctaatggggatatcagcagcagatctatcaagctacacggagatggcaacacagatagacatgcgtacaactcggatgctccttcagctcatcaagatgttgtacattcagaatgctgcaatcaagtacgagtacttgtacgctgcgagtgagcggcttaactcatggccagtgaccatgcagacagtatggaccatgctcttgcaacaagagaatgcagctatcttgggcttgctagacttggggccctctaatgatttcacagtaacacatgttgttaaagacataccggtcaagttgttagttgatggttacgattggcattttgagatccctgtggaggattccgcaatcttcccggcaggatggtctcgtgttcggatacgctatgtcgagcttaaatttggcaaacagggtactgacagtaacattgtcatccaccagcctagcactaatactggcctaatctacgtgctcttacaaagctctcgtttcctcagtgatcgcaaacgggaggaggtgatggactatgaggcaagcacgggacttgcatatgcgtacgcctatgacctcagcacgggtgcaaccactctaactaacatcccctcagaggcacatgccaacacatttatgcaaatggcacccttcactgcctggaggcttcgtctctctgcctctgctatggaaaatcagggactggtgtttcctacagccacttctccggacaatactacccaaatctccatcacattctatgtcactgctattcgacggatagatactcgtcgacaacgagctgatgcggagtta

SEQ ID NO: 751 - DNA, 2652 bp, Asplenium scolopendrium
  source 1..2652: mol_type = other DNA
atggagtactccgacttgtatgaggatgtgaaccaggtaagcttacgcttccagcagactgagttctccgaggtcatggtggtccatcgcatgtacttccgccttcttgacctcgacatgagcaccggaccctctttccttatgtttcccggcagcgagaaggtgcgccgcctctacatcgttgccgacattgtcgagcttcccgccaatggcatcaacatgcggcttcccgccaccgtatccgtcgtcatcctctgccgggttctctatgttcaggatgtcaactcgccctttctcacatgcggcctccatttccccttgatgcgcatgcgtgtggtggagacccaagagggcacggtccgtgtctttccggtccccgatagttcctcctcctccggaggtagtaccgacattggcctcttcatccacgccgatcgcttcatctaccggcaggacacctctacccttgaccctcttcagcccctgcaattgagagtgatcggaggttctacattctccacagtccgccctggttggccagaaactcttgaggtattctccctcattttgtggctcactctgtccaaggggcagcccattcctgccacagaatctgatttgcagagatctgacgaggttgagcttctgcccccaccttcccccgaccgactcctcgtagtctttaccggcctcgcacctggaaacatcggcagtatgtctgtggatgttgagtatatcggtgctggatttagctacttcagtatacccccggtggaccctgtccccacggaagttctctccgacccatacatcatcctgggcctacaaatgaacatgctcattgcagagcttgtcctggctgctcacaattctccgcgggtcatcaatgttgtcacgaagcatgtggaatggcttaacaagatattgcggcccaagcttgatttaccgaacgatgatattttaggacttctgtttcgtgtccaaaccttcttgaagatggctaagcagcctcgatctgtagtaccacggttgcaataccacatgtacagtagcctcatcaatcgcatggtgcaagtagcccaggtttacgatcaagatttcaagcaactcaaactcttcattgcgcaaaatcagatccttggcagctacttgttagaacaaaataaggcatttgcaagtaaagagaaggacatgagctctttccactctcaagtcgtgtcgctgcggagaaccgagctcaacaacgcaatagataagatggaccaattgagtgtgcaaatggaaaacgagaatcaagcaatggaccaggccaaagaggacatgatgcaagccattgaagaatatgagaagaagcaactcgccaacgctctttttgctgtgcttggagcgatagcgagtgttgcccttgcctttgcgacagctggtgcaaccgcacctgcggctgtggcggctgcgggggcagctgtgagtgcagcaggcagattggccgaaggtttgaaaaaagttgttgaaatattggaagggctggcagcagtgatggagattgttgcagtcataagggagcttgtagagtcactgcagaaccttggaagtctgattgacacaccggacatgccagacatgccatcggatgcagactggttgatctttgtgaatgaggtggaggctgttgcagagcaaatgccagcagatgtggttggttcggtggctgtgtggaaggcgaagtgcaagaacgtggctgtgcttgggcaggagatgtgcaccacagcggcacacatcggagagttaacataccagataaaggtggaagaaatgctacaagagattgcacaaaaacaagcaaacaggttggagggaataacacctgcagacttatcaagctacacagaaatgctttcacagatagacatgcgcaccactcgacagctgcttcagctcatccgggtgttgaacatccaaaatgcagcaatcaagtacgagtacttgtatgttgcaagcaggcagttggattcatggccggtgagtatggatactgtttggagcatgctcttgcagcaagagacctcagctatcacaggcttgttagacctgggaccctctaccgatttcacacgcacctttgtcgtcaaaaacattccggtgggactcttagttgatggtagagattggcagttcgtcatccccgtggaggattctccgacctttcccatcgggtactctcgtgttcgcatacgttatgtcgagctgaaattcgagcaagacagtaatgatggcagtgtcatccaccagcctcgcacaaacagcggcttgatatacatgctcttacaaaactctcaattgtttagtgatcggaggcggagggagatactggactatgaggcaagcatgggacttgcatatgcatttgcatacaatcttaccacgggagtgcctactctcaccaacatcccctccgatgagcatgccaacactttcatgcgaatgacgcccttcaataattggcgacttcgactctcttcctctgctgaggaaaatcggggattggcatttcccacggccaattctctagatgatatcacccaagtttccatcacattctacattactgctattcgtggaatagatacccgccgggaagtcgatgaggagtga

SEQ ID NO: 752 - DNA, 2640 bp, Asplenium scolopendrium
  source 1..2640: mol_type = other DNA
atggagtatggcagcttgtatggtgatgtgaaccaggtgagcctgaggttcgagaagacggaggtctctgaggtgatggtggtgcatcggatgcatgtgcggctggaggagctggacatgagcagcgacaagctcaaacgcctgttcgtgctggcggacgtggtggagctgccttcccagcgtaaaactatcgttatccccgccaccgtttcggtgataatcatgtgccgcattctctacatcccttacatctggaccgtgctcgacaactgcaccgtcctcctcccgcacatgcgcttccgggtcgtcgaaacaagcatcgcgcccagagctggccaattctttgccttaccctcctctgactccgtcgacaacggcgccggcagcgttggcggcctctacatccatgccgaccgcttcatctaccgccagggcacatcgtttacctccgactggagccactccgactgggtccagcctctgcaactccgggtacaaggcagctccaccttctcctcaaccttccgtgatcctaactggccagaaaccctacctgtcaccaacctcaatcaaaccctcagcctctccttgggctcattcctcacaccctccgactctgacttgcagagatctgacgagattgagttcctggcgacggagccccagagagtgcaagtgatatttaaccgacccggcggctcgaccggcgtgcttttattcgtcgagaactcccctgaaatcagctttttccctgcaccatcgctgcaacatgtccctgcagacgtcctcgccgatccttccatcatcttgggcatgcaaatgaacatgctcagtgccgagcttgtcctggctgctcacaattcgcagcaagtcatcaaagctgtcactaagcatgtggaatggctcagcaagatcttgcttcaggttgcttcaccgagtgatgacattctagcgctcttgtttcgcgtgcaagcattcattaagatggcaaagcaatcgcgctttgtggttccacggttacaataccacgcgtacattaaccttatcaatcggatggtgcaagtagcccaggattatgaccaggagttcaggcaactcaggcttttcattgcacaaaatgagatattgggaagctatttgctacagcaaaataaggctttcgcagataaggagaaggacatgagtgctttccactcgcaagttgtgtctatgaggagatccgagctgacctctaccatagaaatgatgggcaggctgagcttgcaaatggaaacggagggtgaggcgatggacgaagccaaggacagtatggtcgaagcaattcaagaatatgaaaggaaacaacttgcaagggctctatttgcagtgcttggggcaatagcagctgttgctcttgcatttgccactggaggtgcaactgcaccagcggcagtggcagcagctggagcggcagtctctgcagcaggtagattggcagaaggcctccgaagggtcgtggagatcctccaaggcttgcaagagatcatggaggttgtggcagctataagagatctcgtagaatcactggaaaacatgggtcaacttgtagcagctcctgaaatgccagagatgcctacaaatgcagactggttaatttttgtaaatgaggtggaggcagtggcagagcaagtgccagaagaagtgtcagaggtcccagtgtggaaggccaagtgcaagaatgtggcggtgctagggcaagagatgtgcacaacagcagcacatattagcgagctacagtatcagataagggtggaagagatgctacaggagattgcagaacgtcaagcagacaggctaatggcgatatcagcagcagatctttcaagctacacggagatggcaacacagatagacatgcgtacaacgcggatgctccttcagctcatcaagatgttgtacattcagaatgctgcaatcaagtacgggtacttgtaccctgcgagtgagcggcttaactcatggccagtgaccatgcagacagtatggaccatgctcttgcaacaagagaatgcggctatcttgggcttgctagacttggggccctctaatgatttcacagtaacacatgttgttaaagacataccggtcaagttgttagttgatggttacgattggcattttgagatccctgtggaggattccgcaatcttcccggcaggatggtctcgtgttcggatacgctatgtcgagcttaaatttggcaaacagggtactgacagtaacattgtcatccaccagcctagcactaatactggcctaatctacgtgctcttacaaagctctcgtttcctcagtgatcgcaaacgggaggaggtgatggactacgaggcaagcacgggacttgcatatgcgtacgcctataacctcagcacgggtgcaaccactctaactaacatcccctcagaggcaaatgccaacacatttatgcaaatggcacccttcactgcctggaggcttcgtctctctgcctctgctatggaaaatcagggactggtgtttcctacagccacttctccggacaatactacccaaatctccatcacattctatgtcactgctattcgagggatagatcgtcgacaaggagctgatgcggagtta

SEQ ID NO: 753 - DNA, 2640 bp, Asplenium scolopendrium
  source 1..2640: mol_type = other DNA
atggagtatggcagcttgtatggtgatgtgaaccaggtgagcctgaggttcgagaagacggaggtctctgaggtgatggtggtgcatcggatgcatgtgcggctggaggagctggacatgagcagcgacaagctcaaacgcctgttcgtgctggcggacgtggtggagctgccttcccagcgtaaaactatcgttatccccgccaccgtttcggtgataatcatgtgccgcattctctacatcccttacatctggaccgtgctcgacaactgcaccgtcctcctcccgcacatgcgcttccgggtcgtcgaaacaagcatcgcgcccagagctggccaattctttgccttaccctcctctgactccgtcgacaacggcgccggcagcgttggcggcctctacatccatgccgaccgcttcatctaccgccagggcacatcgtttacctccgactggagccactccgactgggtccagcctctgcaactccgggtacaaggcagctccaccttctcctcaaccttccgtgatcctaactggccagaaaccctacctgtcaccaacctcaatcaaaccctcagcctctccttgggctcattcctcacaccctccgactctgacttgcagagatctgacgagattgagttcctggcgacggagccccagagagtgcaagtgatatttaaccgacccggcggctcgaccggcgtgcttttattcgtcgagaactcccctgaaatcagctttttccctgcaccatcgctgcaacatgtccctgcagacgtcctcgccgatccttccatcatcttgggcatgcaaatgaacatgctcagtgccgagcttgtcctggctgctcacaattcgcagcaagtcatcaaagctgtcactaagcatgtggaatggctcagcaagatcttgcttcaggttgcttcaccgagtgatgacattctagcgctcttgtttcgcgtgcaagcattcattaagatggcaaagcaatcgcgctttgtggttccacggttacaataccacgcgtacagtaaccttatcaatcggatggtgcaagtagcccaggattatgaccaggagttcaggcaactcagacttttcattgcacaaaatgagatattgggaagctatttgctacagcaaaataaggctttcgcagataaggagaaggacatgagtgctttccactcgcaagttgtgtctatgaggagatccgagctgacctctaccatagaaatgatgggcaggctgagcttgcaaatggaaacggagggtgaggcgatggacgaagccaaggacagtatggtcgaagcaattcaagaatatgaaaggaaacaacttgcaagggctctatttgcagtgcttggggcaatagcagctgttgctcttgcatttgccactggaggtgcaactgcaccagcggcagtggcagcagctggagcggcagtctctgcagcaggtagattggcagaaggcctccgaagggtcgtggagatcctccaaggcttgcaagagatcatggaggttgtggcagctataagagatctcgtagaatcactggaaaacatgggtcaacttgtagcagctcctgaaatgccagagatgcctacaaatgcagactggttaatttttgtaaatgaggtggaggcagtggcagagcaagtgccagaagaagtgtcagaggtcccagtgtggaaggccaagtgcaagaatgtggcggtgctagggcaagagatgtgcacaacagcagcacatattagcgagctacagtatcagataagggtggaagagatgctacaggagattgcagaacgtcaagcagacaggctaatggcgatatcagcagcagatctttcaagctacacggagatggcaacacagatagacatgcgtacaacgcggatgctccttcagctcatcaagatgttgtacattcagaatgctgcaatcaagtacgggtacttgtaccctgcgagtgagcggcttaactcatggccagtgaccatgcagacagtatggaccatgctcttgcaacaagagaatgcggctatcttgggcttgctagacttggggccctctaatgatttcacagtaacacatgttgttaaagacataccggtcaagttgttagttgatggttacgattggcattttgagatccctgtggaggattccgcaatcttcccggcaggatggtctcgtgttcggatacgctatgtcgagcttaaatttggcaaacagggtactgacagtaacattgtcatccaccagcctagcactaatactggcctaatctacgtgctcttacaaagctctcgtttcctcagtgatcgcaaacgggaggaggtgatggactacgaggcaagcacgggacttgcatatgcgtacgcctataacctcagcacgggtgcaaccactctaactaacatcccctcagaggcaaatgccaacacatttatgcaaatggcacccttcactgcctggaggcttcgtctctctgcctctgctatggaaaatcagggactggtgtttcctacagccacttctccggacaatactacccaaatctccatcacattctatgtcactgctattcgagggatagatcgtcgacaaggagctgatgcggagtta

SEQ ID NO: 754 - protein, 846 aa, Polystichum tsus-simense
MDYSTLYRDLNQVRVPVDRAEFSEVMVIHRMYVRLSDLDVGELVGAERVKRLYVFADVVELVPQTVWFRQIQMPGSVTVIILCRLLQFPTVGSQAETLQLPFMRLQAIVKEQNRSEITAADGMKWGTYIHGNEVQLRSNNSRFDVWAPRSIITSAIHNVLNEPGRLASNTVIARAQGAVTTTRMSAWLSHQGFVLPTVSPTAFSVLPLQSTNVSFTSIPVEVVTDPNILLGMQTTLHIAELVKVCHPSPDIVSAVAEHAIWLSKVLLQVVQNESQLQGTESYNECLALLGRVQSVIKMGRFGSVVPQLQYRMYGSLINQMAQVAQNYDREFKQFKLFIIQNQILGSYLLQQNKAFADRELQMESFHSAVISHRAQELDTAIAKMDRLSLQMEEENRAMEQAEKEMNEGLRRFQNEQVARAIFSVLRAVAMIGLAFVTGGATAPAAVASAGQAVSIAGQAAQALRRVVEILEGLAAVMEVVAAVKELVASLEQVGQIVDAPEMPDMPSEADWSIFVNEIEAVAEGMPTEVSEVPTWKAKCKNVAALGREMSITAVQISELQYHIWVQGLMRDIARSQADRLAAIQPVDLTNYLEMATQMDMRTTRMLIGLLNMLRIQNAALMYEYLLTPMELTAWPLEMDTMANLLIEQENSALLGLIQLGPSSDFTSRHVVKGIPVSLLLDGEDWEFEIPVQRGMSSFPFSWTRVRIRHLEMHFVQEASSGGEIIHQPATQTGTVYILLQGSTIFHDRRRDEVMTFQAADPLNYQYAYRLDTGEATLTNEPSEQFANTFMQMTPFTRWRLRLSASAKENAGLAFPTATAPDSTTEIVITFHVTAIRQIDWRQEVEE

SEQ ID NO: 755 - protein, 846 aa, Polystichum tsus-simense
MDYSTLYRDLNQVRVPVDRAEFSEVMVIHRMYVRLSDLDVGELVGAERVKRLYVFADVVELVPQTVWFRQIQMPGSVTVIILCRLLQFPTVGSQAETLQLPFMRLQAIVKEQNRSEITAADGMKWGTYIHGNEVQLRSNNSRFDVWAPRSIITSAVHNVLNEPGRLASNTVIARAQGAVTTTRMSAWLSHQGFVLPTVSPTAFSVLPLQSTNVSFTSIPVEVVTDPNILLGMQTTLHIAELVKVCHPSPDIVSAVAEHAIWLSKVLLQVVQNESQLQGTESYNECLALLGRVQSVIKMGRFGSVVPQLQYRMYGSLINQMAQVAQNYDREFKQFKLFIIQNQILGSYLLQQNKAFADRELQMESFHSAVISHRAQELDTAIAKMDRLSLQMEEENRAMEQAEKEMNEGLRRFQNEQVARAIFSVLRAVAMIGLAFVTGGATAPAAVASAGQAVSIAGQAAQALRRVVEILEGLAAVMEVVAAVKELVASLEQVGQIVDAPEMPDMPSEADWSIFVNEIEAVAEGMPTEVSEVPTWKAKCKNVAALGREMSITAVQISELQYHIWVQGLMRDIARSQADRLAAIQPVDLTNYLEMATQMDMRTTRMLIGLLNMLRIQNAALMYEYLLTPMELTAWPLEMDTMANLLIEQENSALLGLIQLGPSSDFTSRHVVKGIPVSLLLDGEDWEFEIPVQRGMSSFPFSWTRVRIRHLEMHFVQEASSGGEIIHQPATQTGTVYILLQGSTIFHDRRRDEVMTFQAADPLNYQYAYRLDTGEATLTNEPSEQFANTFMQMTPFTRWRLRLSASAKENAGLAFPTATAPDSTTEIVITFHVTAIRQIDWRQEVEE

SEQ ID NO: 756 - protein, 891 aa, Polystichum tsus-simense
MTMAAITAPRKYSELYKDLNQISERIRLDQMEFSEVMVIHRMFIKLEELDLGYLEGAERVKRLYVFADVVEVEEGGNFIEVGPLARLPGSIVVVILCRVLKVGVVMNNYLNNAMRVQLPHMKLRLVEVTTQPTGTKLHIHRADAEDYQYPALCIHASVIQSSIRLASTNRPPTYPIPLRFFTFMPDRGSGDVVFSSESRSLIDEPVNIFYVYSHMPEFRRSLPVPEAATLDPASLSDDWYYVHLSRVNSVMSSYVAAEGELEPAFSLLKPKIPFAVLTDPNILLAMQTSLLIAELVELAHPSADTADAVAKHVEWLSKILLQAVSTDEEGMLNPSHDEHLALLFRAQYLMKMMPGRTRSLVVPQLQYDVYSNLINRMAQVAESYDQSLRQFKLFIEQNKILGSYLLQQNKAFADRERDMDVFHSELISQRKIELDNTLLKMDQLSLQMETQREDMDQAKNDMDAGLREFQNRQVAAAMFAVIGAIAAIGLAFVTGGATAPAAMVAAKTAVTAAGAAARALERVIEILDSLQAVMEMVSLIKELVSSLEEIGQLVEAPEMPEMPTEADWFIFENEIEGVAEQMPTEVSEVSAWKTKCKNVAVLGREMITTASYISELQYDIKVQGMLQEIARSHANRLSSIQATDLSNYTEMVTQMDMRTTRMLVALIKVVHMQNAALMYQCLSPPTYVNAWPVTMETVWTMLVQHEHAAVLGLMRLGPSFDFMRTYVVEGIPVQLLLDGEDWEFDIPVEDYTTFPSTWSRVRIHHLEMKFVQAADVHQPITDTGTVYMLLQGSRIFRDRNRADAIHYEAAMSLDYHYAYRLDTGETTLSNLPSQDFTRTFMRMTPFTNWRLRLSASAEENKGLRFPTATSAGSTTQIAVIFYISAIRKISF

SEQ ID NO: 757 - protein, 893 aa, Polystichum tsus-simense
MTMAATAPREYSELYKDLNQISERIRLDQMEFSEVMVIHRMFIKLEELDLGHLEGAERVKRLCVFADVVEVEEGGNFIDVGPVARLPGSIMVVILCRVLKVGVVMSDFYVNNAMRLQLPHMKLRLVEVTTQPTGTKLHIHRADAEDYQYPALCIHASVIQSSIRLRSSSNNRPPTFPIPLRFFNFRPDRGSNDVVFSSESRSLIDEPVNIFYVYSHMPAFLHALPIPEAATIDPASLSSDWYYVHLSRVNSVLSSSVAAEGELEPAFSLLKPKIPFAVLTDPNILLAMQTSLLIAELVELAHPSADTADAVAKHVEWLSKILLQAVSTDEEGMLNPSHDEHLALLFRAQYLMKMMPGRTRSLVVPQLQYDVYSNLINRMAQVAESYDQSLRQFKLFIEQNKILGSYLLQQNKAFADRERDMDVFHSELISQRKIELDNTLLKMDQLSLQMETQREDMDQAKNDMDAGLREFQNRQVAAAMFAVIGAIAAIGLAFVTGGATAPAAMVAAKTAVTAAGAAARALERVIEILDSLQAVMEMVSLIKELVSSLEEIGQLVDAPEMPEMPTEADWFIFENEIEGVAEQMPTEVSEVSAWKTKCKNVAVLGREMITTASYISELQYDIKVQAMLQEIARSHANRLSSIQATDLSNYTEMVTQMDMRTTRMLVALIKVVHMQNAALMYQCLSPPTYVNAWPVTMETVWTMLVQHEHAAVLGLMRLGPSFDFMRTYVVEGIPVQLLLDGEDWEFDIPVEDYTTFPSTWSRVRIHHLEMKFVQAADVHQPITDTGTVYMLLQGSRIFRDRNRADAIHYEAAMSLDYHYAYRLDTGETTLSNLPSQDFTRTFMRMTPFTNWRLRLSASAEENKGLRFPTATSAGSTTQIAVIFYISAIRKISF

SEQ ID NO: 758 - protein, 851 aa, Rumohra adiantiformis
MDYSTLYTDLNQISMPLDRVEFSEVMVIHRMYLRLSDLNVGELPGAERVKRLYVFADVVELATFAYPQFLHTRMPGSVTVIILCRLLQFPTDGSFPAWLELPFMELHTLIEQHRSEIKAADDANWGTYVHAEEVQLSPLFNGWPYLVVEAQRCIITAAMHNTFNRTGWVRSVTQFINDQSGRVETTLLARTEFGHIYLPLETDSPTAFSVSHRQITNLPVEYTGIPVEVVTDPNILMGMQTSVHIAELVKACYPSPELVSAVGVHVNWLNEVLLRVVQNESQLQGTEAYNECLALLGRIQCVMKMGPFVSVVPQLQYRMYGSLIRQMAQVAQNYDQDFRQLKLFIAQNQILGSYLLQQNKAFADREVQMESFHSAVISQRRQELDDAIAKMDRLSLQMEEEDRAMEQARKEMEEGLKQFQNEQVARAVFAVLKSVAMIALAFVTAGATAPGAAASAAQAVSIAVQAAQGLQRVVEILEGLEAVMEVVAAIKDLVGALDQVSQIVDAPPMPDMPSEADWSIFVNEIEAVAEGMPTEVSEVPAWKAKCKNVAALGREMCITAEQISQLQYDIWVQGLLREIAQSHADRLAAIQPANLTNYLEMAIQMDMRTTRILIGLLNIMRIQNAALMYEYLLTPTQLTAWPLRMDTVANLLITQESAALSGLAQLGPPSDFTSRHVVKAIPVSLLLDGKDWEFEIPVQGGMSSFPSSWTRVRIRHLEMHFVQEASGGGEIIHQPATQTGTVYILLQGSTVFHDRRREEVMTFQAAVPLNYHYAYRLDTGEATLTNEPSEQFANTFMQMTPFTHWRLRLSASAAENEGLAFPTATAPDSTTEIAITFHVTAIRQIDWRQEE

SEQ ID NO: 759 - protein, 851 aa, Rumohra adiantiformis
MDYSTLYTDLNQISMPLDRVEFSEVMVIHRMYLRLSDLNVGELPGAERVKRLYVFADVVELATFAYPQFLHTRMPGSVTVIILCRLLQFPTDGSFPAWLELPFMELHTLIEQHRSEIKAADDANWGTYVHAEEVQLSPLFNGWPYLVVEAQRCIITAAMHNTFNRTGWVRSVTQFINDQSGRVETTLLARTEFGHIYLPLETDSPTAFSVSHRQITNLPVEYTGIPVEVVTDPNILMGMQTSVHIAELVKACYPSPELVSAVGVHVNWLNEVLLRVVQNESQLQGTEAYNECLALLGRIQCVMKMGPFVSVVPQLQYRMYGSLIRQMAQVAQNYDQDFRQLKLFIAQNQILGSYLLQQNKAFADREVQMESFHSAVISQRRQELDDAIAKMDRLSLQMEEEDRAMEQARKEMEEGLKQFQNEQVARAVFAVLKSVAMIALAFVTAGATAPGAAASAAQAVSIAGQAAQGLQRVVEILEGLEAVMEVVAAIKDLVGALDQVSQIVDAPPMPDMPSEADWSIFVNEIEAVAEGMPTEVSEVPAWKAKCKNVAALGREMCITAEQISQLQYDIWVQGLLREIAQSHADRLAAIQPANLTNYLEMAIQMDMRTTRILIGLLNIMRIQNAALMYEYLLTPTQLTAWPLRMDTVANLLITQESAALSGLAQLGPPSDFTSRHVVKAIPVSLLLDGKDWEFEIPVQGGMSSFPSSWTRVRIRHLEMHFVQEASGGGEIIHQPATQTGTVYILLQGSTVFHDRRREEVMTFQAAVPLNYHYAYRLDTGEATLTNEPSEQFANTFMQMTPFTHWRLRLSASAAENEGLAFPTATAPDSTTEIAITFHVTAIRQIDWRQEE

SEQ ID NO: 760 - protein, 901 aa, Rumohra adiantiformis
MAASAAAIPDYKELYRDLNQISERMRLDQMDFSEVMVIHRMYIRLEELDLGHLEGADKVKRLYVLADVVEVEEGGNFIEQGPVARLPGSILVVILCRVLLVGIVINVHSNGENFNNAMRLQLPHLKLRAVEISSSTDSNFKLEMHRVDQTAGEYNQYPALTVNADLVQCRMRWVIHRPPITSVSLSPIFVAFMPDRGSGDVIFSSESRSMVDRPVQMFSVYSHVPRFIQSRPLPLPEEVTIDLSSWEPKEFYSLFVSTAPTVSLSKSEAVAGDLEPAFSILKRTVPVVVLTDPNILLAMQASLLIAELVQIAHPSPDTADAVAKHVEWLNKLLIQAASDTEGTPAHHEYLALLFRAQYVMKKIGRTRHLVVPQLQYDVYSGLINRMAQVAESYDQSLRQFKLFIQQNKILGSYLLQQNRAFADKERDMDVFYSELISQREVELQSTLLKMDQLSSQMETQREDMEQAQKEMEEGLRRFQNRAVANAMFAVIGAVAAIGLAFLTGGATAPGAMAAAGNAVTAAGQAARALQRVLDILEGLQVVMEVLSIIKELVASLQDLGQLVDAPEMPEMPLESDWYIFENSIEEVAEGMPEEVSEVTAWKTKCKNVAVLGREMITTAVYISQLMYDIKVQGMLQEIAKSHAQRLENIQAADLQGYTEMVTQMDMRTTRMLVELIKVVYMQNAALMYQSLSPPTAVNAWPVTMETVWSILLQHDHAALLGLLRLGPSFDFMRTYTVEDVPVSLLLDGEDWQFEIPVRDYTVFPSTWSRVRIHHLEMKFVKAAHVHQPITDTGSIYVLLQGSRIFRDRNEDETIDYEAALPLDYHYAYRLDTGETTLSNLPSQEFTKTFLRMTPFSNAWRLRLSSSAEENKGLAFPTATAADSTTQIAITFYVTAIRRISF

SEQ ID NO: 761 - protein, 901 aa, Rumohra adiantiformis
MAASAAAIPDYKELYRDLNQISERMRLDQMDFSEVMVIHRMYIRLEELDLGHLEGADKVKRLYVLADVVEVEEGGNFIEQGPVARLPGSILVVILCRVLLVGIVINVHSNGENFNNAMRLQLPHLKLRAVEISSSTDSNFKLEMHRVDQTAGEYNQYPALTVNADLVQCRMRWVIHRPPITSVSLSPRFVAFMPDRGSGDVIFSSESRSMVDRPVQMFSVYSHVPRFIQSRPLPLPEEVTIDLSSWEPKEFYSLFVSTAPTVSLSKSEAVAGDLEPAFSILKRTVPVVVLTDPNILLAMQASLLIAELVQIAHPSPDTADAVAKHVEWLNKLLIQAASDTEGTPAHHEYLALLFRAQYVMKKIGRTRHLVVPQLQYDVYSGLINRMAQVAESYDQSLRQFKLFIQQNKILGSYLLQQNRAFADKERDMDVFYSELISQREVELQSTLLKMDQLSSQMETQREDMEQAQKEMEEGLRRFQNRAVANAMFAVIGAVAAIGLAFLTGGATAPGAMAAAGNAVTAAGQAARALQRVLDILEGLQVVMEVLSIIKELVASLQDLGQLVDAPEMPEMPLESDWYIFENSIEEVAEGMPEEVSEVTAWKTKCKNVAVLGREMITTAVYISQLMYDIKVQGMLQEIAKSHAQRLENIQAADLQGYTEMVTQMDMRTTRMLVELIKVVYMQNAALMYQSLSPPTAVNAWPVTMETVWSILLQHDHAALLGLLRLGPSFDFMRTYTVEDVPVSLLLDGEDWQFEIPVRDYTVFPSTWSRVRIHHLEMKFVKAAHVHQPITDTGSIYVLLQGSRIFRDRNEDETIDYEAALPLDYHYAYRLDTGETTLSNLPSQEFTKTFLRMTPFSNAWRLRLSSSAEENKGLAFPTATAADSTTQIAITFYVTAIRRISF

SEQ ID NO: 762 - protein, 853 aa, Asplenium trichomanes
MDYSTLYRDLNQISMPVDHVEFSEVMVIHRMYVRLSDLDVGELAGAEKVKRLYLFADVVELAPELAPGKRTQMPGSITVIILCRLLQFPTDGSRAATLQLPFMKLHAILRERYRSEITAADGTNWGTYIHGDEVQVSPLYTNNSVLPVWADRSIITSAFHNVLDEPGRVISSTSITMAQAAPNNTRMTAEPGWVFGNRFLLYTVSSTAFSVLPLQSTNISFTSIPVEVVADPNILLGMQTTVHIAELVKACRPSPDIVSAVGQHVIWLNKVLLHVVQNESQLQGTESYNECLALLGRVQSVMKIGRSGSVVPQLQYRMYGSLIKQMAQAAQNYDQEFRQFKLFIIQNQILGSYLLQQNKAFADRELQMESFHSAVISQRMQELDTAIAKMDRLSLQMEEENKAMEQAQREMDEGLRRFRNEQVARAVFSVLRAVAMIALAFVTGGATAPGAAASAGQAVSIAGQAAQALQRVVEILDRLEAVMEVVAAVKDLVDSLEQVGQIVEAPVMPDMPSEADWSIFVNEIEAVAEGMPTEVSEVPAWKAKCKNVAALGREMSITAVQISELQYDIWVHGLMRDMARSQADRLAAIQPADLTNYLEMATQMDMRTTRMLLGLLNMLHIQNAALMYEYLLTPTELTAWPLGMDIVANLLIAQENAALLGLVQLGPPSDFTSKHVVKGIPVSLLLDGEDWEFEIPVEGGMSSFPSSWTRVRIRHLEMHFVQEMSGGSEIIHQPATQTGTVYILLQGSTTFHDRRRDEVMTFQAAAPLNYHYAYRLDTGEATLTNEPSEQFANTFMQMTPFTRWRLRLSASAAENAGLGFPTATAPDSTTEIVITFHVTAIRQIDWRHEEEEE

SEQ ID NO: 763 - protein, 827 aa, Asplenium trichomanes
MDYSTLYRDLNQISMPVDHVEFSEVMVIHRMYVRLSDLDVGELAGAEKVKRLYLFADVVELAPELAPGKRTQMPGSITVIILCRLLQFPTDGSRAATLQLPFMKLHAILRERYRSEITAADGTNWGTYIHGDEVQVSPLYTNNSVLPVWADRSIITSAFHNVLDEPGRVISSTSITMAQAAPNNTRMTAEPGWVFGNRFLLYTVSSTAFSVLPLQSTNISFTSIPVEVVADPNILLGMQTTVHIAELVKVQNESQLQGTESYNECLALLGRVQSVMKIGRSGSVVPQLQYRMYGSLIKQMAQAAQNYDQEFRQFKLFIIQNQILGSYLLQQNKAFADRELQMESFHSAVISQRMQELDTAIAKMDRLSLQMEEENKAMEQAQREMDEGLRRFRNEQVARAVFSVLRAVAMIALAFVTGGATAPGAAASAGQAVSIAGQAAQALQRVVEILDRLEAVMEVVAAVKDLVDSLEQVGQIVEAPVMPDMPSEADWSIFVNEIEAVAEGMPTEVSEVPAWKAKCKNVAALGREMSITAVQISELQYDIWVHGLMRDMARSQADRLAAIQPADLTNYLEMATQMDMRTTRMLLGLLNMLHIQNAALMYEYLLTPTELTAWPLGMDIVANLLIAQENAALLGLVQLGPPSDFTSKHVVKGIPVSLLLDGEDWEFEIPVEGGMSSFPSSWTRVRIRHLEMHFVQEMSGGSEIIHQPATQTGTVYILLQGSTTFHDRRRDEVMTFQAAAPLNYHYAYRLDTGEATLTNEPSEQFANTFMQMTPFTRWRLRLSASAAENAGLGFPTATAPDSTTEIVITFHVTAIRQIDWRHEEEEE

SEQ ID NO: 764 - protein, 903 aa, Asplenium scolopendrium
MGVTVVSDELCLLDLDEGSEEWVKDEEAIKAARSSTPEVNYEALYANANQIARDLRVGSVPCGELLSVNGRMFVRLDSLDVSRLRQPERVQNLIVLADVVEISGRDLVLPGASSVRIICRILHLRSRDVQLDLPYAWRTSSQTQPFQFSLRAQQIVVSPSAAPPSLSSTGALVVRLHRELNQWATTRTRFTQYVVRCFGYTASSVNSTVNINIPVSAETPPSFHWLRVNSENLNLKVNQDAVWRAHVDVQVALPSQLDLNDLHVMMGMESTLLTAEMILSYRSDRPDVVALAVEHVEWIRMSLVQNHEQQPNLPDNQFALLARAEMLAKLSIDGSQSLVVPQLEYTAYSEVIRQIAVVAEAYNQEFTQLHLFVQQTTILGDYVLNTVKALAEKEKDIALLEEAVVRGKQSELDIAVEKIERLEQQILKQIEEVQEAKEDMEKGIIAYRNRLIANAFFEVLSAVLQIAGSFVYFKTGQITDGLAALGGGLASANQAIWLIVDAVDAKNSLSNITDNLVDVEKAMKVVNAVLALVDTVTNLDELLDAPRMPDVDSSHWDIMENEIEIVAAQLPTEVSEVRVWSLKCRNVVIVCREVCTTAAAIMQLQYELFVHARKKEISERHAERLAQIQAVDLGDYLELASQADMRTVRLLIQLLDLLATQNGALQYHYLLPPEPFVGWPTIDNVRRMLVARQQQAVISQTSLGPSYRVRTRLVLDSVPVGLLLSGEDYSFTIAPISEQSIPVFPAVWSRVRIEELQMVFTAGTTGAHMPVAGPGGKVYLLLQPSSTFHDRLRYQAFNYQAAAPRPFQYVYDLATGEPSLVSRPSEPGLFLRMTPFTRWRLRLSASAYQNEGISFPTATAADSVAEITITFELTAIVHPQSFLEEDGITFLMPGKGGDDQVVS

SEQ ID NO: 765 - protein, 903 aa, Asplenium scolopendrium
MGVTVVSDELCLLDLDEGSEEWVKDEEAIKAARSSTPEVNYEALYANANQIARDLRVGSVPCGELLSVNGRMFVRLDSLDVSRLRQPERVQNLIVLADVVEISGRDLVLPGASSVRIICRILHLRSRDVQLDLPYAWRTSSQTQPFQFSLRAQQIVVSPSAAPPSLSSTGALVVRLHRELNQWATTRTRFTQYVVRCFGYTASSVNSTVNINIPVSAETPPSFHWLRVNSENLNLKVNQDAVWRAHVDVQVALPSQLDLNDLHVMMGMESTLLTAEMILSYRSDRPDVVALAVEHVEWIRMSLVQNHEQQPNLPDNQFALLARAEMLAKLSIDGSQSLVVPQLEYTAYSEVIRQIAVVAEAYNQEFTQLHLFVQQTTILGDYVLNTVKALAEKEKDIALLEEAVVRGKQSELDIAVEKIERLEQQILKQIEEVQEAKEDMEKGIIAYRNRLIANAFFEVLSAVLQIAGSFVYFKTGQITDGLAALGGGLASANQAIWLIVDAVDAKNSLSNITDNLVDVEKAMKVVNAVLALVDTVTNLDELLDAPRMPDVDSSHWDIMENEIEIVAAQLPTEVSEVRVWSLKCRNVVIVCREVCTTAAAIMQLQYELFVHARKKEISERHAERLAQIQAVDLGDYLELASQADMRTVRLLIQLLDLLATQNGALQYHYLLPPEPFVGWPTIDNVRRMLVARQQQAVISQTSLGPSYRVRTRLVLDSVPVGLLLSGEDYSFTIAPISEQSIPVFPAVWSRVRIEELQMVFTAGTTGAHMPVAGPGGKVYLLLQPSSTFHDRLRYQVFNYQAAAPRPFQYVYDLATGEPSLVSRPSEPGLFLRMTPFTRWRLRLSASAYQNEGISFPTATAADSVAEITITFELTAIVHPQSFLEEDGITFLMPGKGGDDQVVS

SEQ ID NO: 766 - protein, 876 aa, Asplenium scolopendrium
MEYGSLYGDVNQVSLRFENTEVSEVMVVHRMHVRLEELDMSNDKLKRLYVLADVVELPSQRKTIVIPATVSAIIMCRVLYIPYIWTVFDNCTVLLPHMRFRVVETSLTLRTGQFFALPSSDTVDNGAGSFGGLYIHADRFIYRQATSFTSDWVQPLQLRVRGSSTFSSTFRDPDWPETLPVTNLNQTITLSLGSFLTPSDSDLQRSDEIEFLQTEPQRVQVVFNRPGGTTGVALLVENSPEISFFPAPSLEHVPADVLADPSIILGMQMNMLSAELVRAAHNSQQVIKAVTKHVEWLSKILLQVASPSDDILALLFRVQAFIKMAKQSRFVVPRLQYHVYSNLINRMVQVAQDYDQEFRQLRLFIAQNEILGSYLLQQNKAFADKEKDMSAFHSQVVSMRRSELTSTIEMMGRLSLQMETEGEAMDEARDSMVEAIQEYERKQLARALFAVLGAIASVALAFATGGATAPAAVAAAGAAVTAAGRLAEGLRRVVEILEGLQAIMEVVAAIRDLVESLENMGQLVGAPEMPEMPTNADWLIFVNEVEAVAEQVPEEVSEVPVWKAKCKNVAVLGQEMCTTAAHISELQYQIRVEEMLQEIAQRQADRLMGISAADLSSYTEMATQIDMRTTRMLLQLIKMLYIQNAAIKYEYLYAASERLNSWPVTMQTVWTMLLQQENAAILGLLDLGPSNDFTVTHVVKDIPVKLLVDGYDWHFEIPVEDSAIFPAGWSRVRIRYVELKFGKQGTDSNIVIHQPSTNTGLIYVLLQSSRFLSDRKREEVMDYEASTGLAYAYAYDLSTGATTLTNIPSEAHANTFMQMAPFTAWRLRLSASAMENQGLVFPTATSPDNTTQISITFYVTAIRRIDTRRQRADAEL

SEQ ID NO: 767 - protein, 883 aa, Asplenium scolopendrium
MEYSDLYEDVNQVSLRFQQTEFSEVMVVHRMYFRLLDLDMSTGPSFLMFPGSEKVRRLYIVADIVELPANGINMRLPATVSVVILCRVLYVQDVNSPFLTCGLHFPLMRMRVVETQEGTVRVFPVPDSSSSSGGSTDIGLFIHADRFIYRQDTSTLDPLQPLQLRVIGGSTFSTVRPGWPETLEVFSLILWLTLSKGQPIPATESDLQRSDEVELLPPPSPDRLLVVFTGLAPGNIGSMSVDVEYIGAGFSYFSIPPVDPVPTEVLSDPYIILGLQMNMLIAELVLAAHNSPRVINVVTKHVEWLNKILRPKLDLPNDDILGLLFRVQTFLKMAKQPRSVVPRLQYHMYSSLINRMVQVAQVYDQDFKQLKLFIAQNQILGSYLLEQNKAFASKEKDMSSFHSQVVSLRRTELNNAIDKMDQLSVQMENENQAMDQAKEDMMQAIEEYEKKQLANALFAVLGAIASVALAFATAGATAPAAVAAAGAAVSAAGRLAEGLKKVVEILEGLAAVMEIVAVIRELVESLQNLGSLIDTPDMPDMPSDADWLIFVNEVEAVAEQMPADVVGSVAVWKAKCKNVAVLGQEMCTTAAHIGELTYQIKVEEMLQEIAQKQANRLEGITPADLSSYTEMLSQIDMRTTRQLLQLIRVLNIQNAAIKYEYLYVASRQLDSWPVSMDTVWSMLLQQETSAITGLLDLGPSTDFTRTFVVKNIPVGLLVDGRDWQFVIPVEDSPTFPIGYSRVRIRYVELKFEQDSNDGSVIHQPRTNSGLIYMLLQNSQLFSDRRRREILDYEASMGLAYAFAYNLTTGVPTLTNIPSDEHANTFMRMTPFNNWRLRLSSSAEENRGLAFPTANSLDDITQVSITFYITAIRGIDTRREVDEE

SEQ ID NO: 768 - protein, 880 aa, Asplenium scolopendrium
MEYGSLYGDVNQVSLRFEKTEVSEVMVVHRMHVRLEELDMSSDKLKRLFVLADVVELPSQRKTIVIPATVSVIIMCRILYIPYIWTVLDNCTVLLPHMRFRVVETSIAPRAGQFFALPSSDSVDNGAGSVGGLYIHADRFIYRQGTSFTSDWSHSDWVQPLQLRVQGSSTFSSTFRDPNWPETLPVTNLNQTLSLSLGSFLTPSDSDLQRSDEIEFLATEPQRVQVIFNRPGGSTGVLLFVENSPEISFFPAPSLQHVPADVLADPSIILGMQMNMLSAELVLAAHNSQQVIKAVTKHVEWLSKILLQVASPSDDILALLFRVQAFIKMAKQSRFVVPRLQYHAYINLINRMVQVAQDYDQEFRQLRLFIAQNEILGSYLLQQNKAFADKEKDMSAFHSQVVSMRRSELTSTIEMMGRLSLQMETEGEAMDEAKDSMVEAIQEYERKQLARALFAVLGAIAAVALAFATGGATAPAAVAAAGAAVSAAGRLAEGLRRVVEILQGLQEIMEVVAAIRDLVESLENMGQLVAAPEMPEMPTNADWLIFVNEVEAVAEQVPEEVSEVPVWKAKCKNVAVLGQEMCTTAAHISELQYQIRVEEMLQEIAERQADRLMAISAADLSSYTEMATQIDMRTTRMLLQLIKMLYIQNAAIKYGYLYPASERLNSWPVTMQTVWTMLLQQENAAILGLLDLGPSNDFTVTHVVKDIPVKLLVDGYDWHFEIPVEDSAIFPAGWSRVRIRYVELKFGKQGTDSNIVIHQPSTNTGLIYVLLQSSRFLSDRKREEVMDYEASTGLAYAYAYNLSTGATTLTNIPSEANANTFMQMAPFTAWRLRLSASAMENQGLVFPTATSPDNTTQISITFYVTAIRGIDRRQGADAEL

SEQ ID NO: 769 - protein, 880 aa, Asplenium scolopendrium
MEYGSLYGDVNQVSLRFEKTEVSEVMVVHRMHVRLEELDMSSDKLKRLFVLADVVELPSQRKTIVIPATVSVIIMCRILYIPYIWTVLDNCTVLLPHMRFRVVETSIAPRAGQFFALPSSDSVDNGAGSVGGLYIHADRFIYRQGTSFTSDWSHSDWVQPLQLRVQGSSTFSSTFRDPNWPETLPVTNLNQTLSLSLGSFLTPSDSDLQRSDEIEFLATEPQRVQVIFNRPGGSTGVLLFVENSPEISFFPAPSLQHVPADVLADPSIILGMQMNMLSAELVLAAHNSQQVIKAVTKHVEWLSKILLQVASPSDDILALLFRVQAFIKMAKQSRFVVPRLQYHAYSNLINRMVQVAQDYDQEFRQLRLFIAQNEILGSYLLQQNKAFADKEKDMSAFHSQVVSMRRSELTSTIEMMGRLSLQMETEGEAMDEAKDSMVEAIQEYERKQLARALFAVLGAIAAVALAFATGGATAPAAVAAAGAAVSAAGRLAEGLRRVVEILQGLQEIMEVVAAIRDLVESLENMGQLVAAPEMPEMPTNADWLIFVNEVEAVAEQVPEEVSEVPVWKAKCKNVAVLGQEMCTTAAHISELQYQIRVEEMLQEIAERQADRLMAISAADLSSYTEMATQIDMRTTRMLLQLIKMLYIQNAAIKYGYLYPASERLNSWPVTMQTVWTMLLQQENAAILGLLDLGPSNDFTVTHVVKDIPVKLLVDGYDWHFEIPVEDSAIFPAGWSRVRIRYVELKFGKQGTDSNIVIHQPSTNTGLIYVLLQSSRFLSDRKREEVMDYEASTGLAYAYAYNLSTGATTLTNIPSEANANTFMQMAPFTAWRLRLSASAMENQGLVFPTATSPDNTTQISITFYVTAIRGIDRRQGADAEL

SEQ ID NO: 770 - DNA, 57 bp, synthetic construct
  misc_feature 1..57: note = Synthetic
  source 1..57: mol_type = other DNA
cgaaatctctcatctaagaggctggatcctaggatggattacagcacgctttacagg

SEQ ID NO: 771 - DNA, 58 bp, synthetic construct
  misc_feature 1..58: note = Synthetic
  source 1..58: mol_type = other DNA
taagttggccaatccagaagatggacaagtctagactactcctccacctcctgcctcc

SEQ ID NO: 772 - DNA, 52 bp, synthetic construct
  misc_feature 1..52: note = Synthetic
  source 1..52: mol_type = other DNA
cgaaatctctcatctaagaggctggatcctaggatgacgatggcggcaactg

SEQ ID NO: 773 - DNA, 57 bp, synthetic construct
  misc_feature 1..57: note = Synthetic
  source 1..57: mol_type = other DNA
ggccaatccagaagatggacaagtctagactagaaagaaattttcctgatagctgag

SEQ ID NO: 774 - DNA, 58 bp, synthetic construct
  misc_feature 1..58: note = Synthetic
  source 1..58: mol_type = other DNA
cgaaatctctcatctaagaggctggatcctaggatggattacagcactctttacacgg

SEQ ID NO: 775 - DNA, 56 bp, synthetic construct
  misc_feature 1..56: note = Synthetic
  source 1..56: mol_type = other DNA
taagttggccaatccagaagatggacaagtctagactactcctcttgccgccagtc

SEQ ID NO: 776 - DNA, 52 bp, synthetic construct
  misc_feature 1..52: note = Synthetic
  source 1..52: mol_type = other DNA
cgaaatctctcatctaagaggctggatcctaggatggctgcctccgctgctg

SEQ ID NO: 777 - DNA, 58 bp, synthetic construct
  misc_feature 1..58: note = Synthetic
  source 1..58: mol_type = other DNA
taagttggccaatccagaagatggacaagtctagactagaaagaaatgcgccggatag

SEQ ID NO: 778 - DNA, 57 bp, synthetic construct; identical to SEQ ID NO: 770
  misc_feature 1..57: note = Synthetic
  source 1..57: mol_type = other DNA

SEQ ID NO: 779 - DNA, 58 bp, synthetic construct
  misc_feature 1..58: note = Synthetic
  source 1..58: mol_type = other DNA
taagttggccaatccagaagatggacaagtctagactactcctcctcctcctcgtgcc

SEQ ID NO: 780 - DNA, 55 bp, synthetic construct
  misc_feature 1..55: note = Synthetic
  source 1..55: mol_type = other DNA
cgaaatctctcatctaagaggctggatcctaggatgggtgtcacagtcgttagcg

SEQ ID NO: 781 - DNA, 58 bp, synthetic construct
  misc_feature 1..58: note = Synthetic
  source 1..58: mol_type = other DNA
taagttggccaatccagaagatggacaagtctagattagctgacgacctgatcatcgc

SEQ ID NO: 782 - DNA, 56 bp, synthetic construct
  misc_feature 1..56: note = Synthetic
  source 1..56: mol_type = other DNA
cgaaatctctcatctaagaggctggatcctaggatggagtatggcagcttgtatgg

SEQ ID NO: 783 - DNA, 56 bp, synthetic construct
  misc_feature 1..56: note = Synthetic
  source 1..56: mol_type = other DNA
gttggccaatccagaagatggacaagtctagactataactccgcatcagctcgttg

SEQ ID NO: 784 - DNA, 58 bp, synthetic construct
  misc_feature 1..58: note = Synthetic
  source 1..58: mol_type = other DNA
cgaaatctctcatctaagaggctggatcctaggatggagtactccgacttgtatgagg

SEQ ID NO: 785 - DNA, 56 bp, synthetic construct
  misc_feature 1..56: note = Synthetic
  source 1..56: mol_type = other DNA
taagttggccaatccagaagatggacaagtctagatcactcctcatcgacttcccg

SEQ ID NO: 786 - protein, 932 aa, Adiantum peruvianum
MATFEEYHPEQYMELYKDFNQVRERLSLEMMEFSEVMVIHRMYLKLEELDVGHLEGAEKVKHLYVFADVVEMRSREDELEPVARLPGSVSVAIICRVLWIRRQGSVTRETLIAFPHLKVHLKMTGARSVNVYRTHHAAETDDGFVLCIDAGSIQRTSDESTTSGILFSLFSYHFVRSPTLDGKNITFSSDTDSSISNLPVVHFPFYTQGWRWSVTTAGILSFAPSSVTSTTTVHATGSLQTYDFTHLTFAPGFWIMRGIPESLLKDDKLLLFLQTSLLISELAELAHPSSETRNAVLTHVEWLSKILINGESKTEGTEFHHEMQTSLLISELAELAHPSSETRNAVLTHVEWLSKILINGESKTEGTEFHHEYLALSFRAQYMLKTARSTRSLVVPQLQYDVYGPLINRMAQVAQIYDDAINQLKLFVSQNKILGSYLLEQNKTFAARERDMEVFYAELISQMKIELDSTLLKMDQLGAQMEAQSADMEEAQREMEEGLRRFRNRQVAEAMFSVFRAIGAIALAFLTGGATAPAAMSSARRAVTAAEQAARALARVLDILEGLQAVMEVVAIIKDLVESLQNVGQLVDAPDMPEMPTEADWGIFVNEIEGVAEEMPEEVSEVSAWKTKCKNVAVLGRELMTTAAYISRLQYDIQEHAMLQEIARRHADRLSTIQAADLSSYTEMVTQMDMRTTRIMVSLIKVIYMQNAALMYQCLAPPTQVWQWPSLSMETVWTMLMQNEHVAILGLTRLGPSFDFKRIYVVRDIPVSLLLAGQDWEFEIPVSDHTTFPSTWSRVRIQHLEMKFDAGGGAHQPITDTGKVYILLQGSRAFHDRNQVGRLPLLYEAALPLDYHYAYRLDTGETTLSNLPSTNFLDTYMRMTPFTNWRLRLSASAEENKGLDFPTARQESSIKEEATTQIAITFHVSAIRQISF

SEQ ID NO: 787 - protein, 728 aa, Adiantum peruvianum
TNHRHDKELFLPSMNMSMAAAGDMSFLGVNVSTTTVSSSSDVLEFKLQSGSMTSAMRLKDVDAAATLTCIVQTASPSMPLSVMTTGASPGNVWVLGMTTAVVVPASAVAVITDANILLGMQVTVQVAELVKTTHNSDVVIAASTRHVEWLNQLLVQAHAVAPNEDIVTLLYRTQALLKLQREGLVVPRLQYHMYKSLIDRMVQVAQSYDQDFNRLKLFVEQNKILGSYLLEQNKAFAEKEKEMDAFHAQVIELRTAELNGTIDRMDQLSEQMDKENEAMEQAKADMDAGLVEYQNRQVANALFAVLGAIASIGLAFATGGATAPAAVSAAGAAVTAAGQAAAGLRKVIEILEGLQVVMEVVAAIKELVQSLQEIGKLVDAPEMPELPSNADWEIFVNEVEAVAEQMPTEVTEVAAWKAKCKNVAALGREMSTMAAHIAELQYQIQVQEMLREIAQRQADRLSSIRPADLTNYLEMVSEMDMRTTRMLLELIRVLYIQNAALQYEYLQTPAPLSAWPVTMSTVWNLLVQQETAAITGLLELGPPSDFTREYAVKDIPVSLLQEGQDWEFELPVFSADFPSAWSRVRIHHLAMQFDGSAATHVPTTRTGKVYILLQSSRFFDDRAKRANELISYQAGMGLFYQYAYRLSTGEATVTNIPTDEYANTFMRSTPFTRWRIRLSSSAEENEGLAFPTATTADATTQIKITFSVSAIRRVSTRALTANGVVAKW

SEQ ID NO: 788 - protein, 525 aa, Adiantum hispidulum
VRMCAGSCTHANFIEAGSQERRNYLFPSLIISVCACVCVFQFPPLDGVDARSCIKMEYSSLYGDVNQVSLRFEKTEVSEVMVVHRMHVRLEELDMSSDKLKRLYVLADVVELPSQRSTIVVPATVSAIIICRVLYIPYIFTVLENCSFFLSLMRFRVVETRIEPPRTGQFFALPSADAVDDGVGGFRGLYILADRFIYRQATSFTSDWVQPLGLRVRGSSTFSYRQATSFTSDWVQPLSLRVQGSSTFSSTFRPEWPETLPVTNLNHTVTLSLGSFLTPSDSDLQRSDEIEFLPTEPQRVQVVINRGPGSQTGLVLIPENSPEISETEPQRVQVVVNRGPGSQTGLVLVVENSPEISFFPAPSLEHVPADVLADPSIILGMQMNMLSAELVLAAHNSQQVIKAVTKHVEWLNKILLQVASPSDDILALLFRAQAFIKMAKQSRFVVPRLQYHVYRNLINRMVQVAQDYDQELRQLRLFIAQNEILGSYLLQQNKAFAEKEKDMSDFHLQVVSMRRSLGKLFATAK

SEQ ID NO: 789 - protein, 904 aa, Adiantum hispidulum
MAAAAPAARRRDYKELYQDLNQISERMRLDQMDFSEVMVIHRMYIKLEELDLGHLEGAHKVKRLYVLADVVEVEEGSNLHDQGPLARLPGSILVVILCRVLLVGIFVNVRTGTLLNNVMRLQLPHIKLRAVEVRSSITDSNFTLQMHRAQSTGEIYDQYPALTINADLVQCRMRWVHQQPSITSVSLSPRFFAFMPDRGSQDVIFSSESRSMVDRPVQIFYIYSNVLNVIRSHRLPFPEEVTIDLASWEHKEFYYLHVSTAPSVTLSKPSETIQATELEPAFSLLKRSVPAAVLTDPNILLAMQASLLIAELVEIAHPSPDTADEVAKHVEWLNKLLIQAASEREGTSSHHEYLTLLFRAQYIMKKIGRARHLVVPQLQYDVYSGLINRMAQIAESYDQSLRQLILFIQQNKILGSYLLQQNRAFADKERDMDVFYSELISQREVELQSTLLKMDQLSLQMETQREDMEQAQKDMEAGLRRFQNRAVANAMFAVLGAVAAIGLAFLTGGATAPGAMAAAGNAVTIAGQAARALQRVLDILDGLQVVMEVVSLIKELVSSLQDLGQLVEAPEMPEMPLESDWFIFENSIEEVAEGMPEEVSEVSAWRTKCKNVAVLGREMISTAVYISQLMYDIKVQGMLQEIAKSHAQRLEAIQAADMQSYTEMVTQMDMRTTRMLVELIKVVYMQNAALMYQSLSPPTSVNAWPVTMETVWNILLQHDHAALLGLMRLGPSFDFMRTYIVQDIPVSLLLDGEDWQFEIPVRDFTSFPSTWSRVRIHHLEMKFVKATHVHQPITDTGSIYLLLQGSRIFRDRNEDETIDYEAALPLDYHYAYRLDTEETTLSNLPSQEFTKTFMRMTPFSNWRLRLSSSAEENKGLAFPTATSADSTTQIAITFYVTAIRRISF

SEQ ID NO: 790 - protein, 699 aa, Adiantum pedatum L.
RRAPCGGFSRSRTATGFSRLPANTGGQRVARVWQPISDYVDLFASVLPLNFARATHFVSSFEPAFWILTRGIPDSLLKDDKFLLAMQTSLLISELAQLAHPSSETRTAVLEHVRWLSAIVVDGASKTKGTELHREYLALSFRAQYMLKTASSTRSSLVVPQLQYDVYSPLINRMAQVTQIYDDALNQFKLFITQNGMHGSYLLEQNKALAARERDMEVFYSELISQMKIELDSTLLKMDQLGAQMEAQTEDMEQAQREMEQGLRRFKNRQVARAMFSVFAAIGAVALTFLTGGAAAPAAMSAARTAVTAAEQAARALQRVLDILEGLQAVMEVVALIKELVESLQDVGKLVEAPDMPEMPTEADWEIFVNEIEGVAAEMPEEVSEVSAWKTKCKNVAVLGREMTTTAAYISRLQYDIKEHAMLQEIAKRHADRLSTIQAADLSSYTEMVMQIDLRTTRIMVSLIKVIYMQNAALMYQYLAPPTHVWQWPSLSMEAVWTMLMQNEHIAILGLIRLGPSFDFKRTYVVRDIPVSLMLAGEDWEFTIPLSDHTTFPSTWSRVRIQHLEMKFVDDDDAASVHQPITNTGKVYILLQGSRAFHDRNQVGRLPLLYEAALPLDYHYAYCLDTGETTLSNLPSTSFLDTFMRMTPFTNWRLRLSVSAEENQGLDFPTARQQGTINEEATTQIAITFHVSAIRHVSF

SEQ ID NO: 791 - protein, 896 aa, Adiantum pedatum L.
MQLSGGQGQVYQSIMAAAAREYSELYKDLNQISERIRLDQMEFSEVMVIHRMFIRLEELDLGHLEGAERVKRLYVFADVVEVEEGGNFIETGPLARLPGSIMVVILCRVLSVRVLMFDNGNNAMRLQLPHMKLRVVEITTQPTTKLQIHRADAEDYQYPALCIHADVIQASIRLSSSSNRPPMDLRFFNFRPNRGSDNVVFSSESRSLIDEPVEIFYVYSHIPRFIHALPIPEAATVDPASRSNDWYYVSLRRVNSTLSSSVAAEGELEPAFSLLKPKIPVVVLTDPNILLAMQTSLLIAELVEVAHPSAETADAVAKHVEWLNKILLQATKVEGILNSSHDEHLALLFRAQYLMKMRPGRTRNLVVPQLQYDVYSNLVNRMAQVAESYDQSLRQFKLFIDQNKILGSYLLQQNKAFADKERDMDVFHSELISQRKIELDNTILKMDQLSLQMESQREDMDQAKKDMDAGLREFQNRQVANAMFAVIGAIAAIGLAFITGGATAPAAVGAAKTAVTAAGAAARALERVVEILDSLQAVMEIVSIIKELVSSLQEIGQLVEAPDMPPMPTEADWFIFENEIEGVAEQMPTEVSEVSAWKTKCKNVAVLGREMITTATYISELQYDIKVQGMLQEIATSHANRLSSIQATDLSNYTEMVTQMDMRTTRMLVALINVVHMQNAALMYQCLSPPTYVNAWPVTMETVWSMLVQHEHAAVLGLMRLGPSFDFMRTYVVEGIPVQLLLDGEDWEFEISVEDYTTFPSTWSRVRIHHLEMKFVQAADVHQPITDTGKVYMLLQGSRIFRDRNRADAIRYEAAMSLDYHYAYRLDTGETTLSNLPSQDFTRTFMRMTPFTNWRLRLSASAEENKGLGFPTATSAGSTTQIAIIFYISAIRRISL

SEQ ID NO: 792 - protein, 845 aa, Adiantum pedatum L.
VDYESIYKNAHEIGTVVGTDKIPCSEVMVCHRMYVNLDTFRVEQLVGYANVKQLIVFADVVEISCRWTYKLFLPFHTDFRIVCRLLKMKDDHEAIYLDWQRMDGRWMDSLYLPFHTDLRIVCRLLRMTEDHASIHLDWQLVNNSRCAIYAQELVSSTSNTPRLNLLVSRRTIHTNVPDRIIDIKNIVLYYNSQRDYDFTYFDEKTKVEYSYSVSVHFGSTPSVEVLAEDNILTGLQSTILITEMILNYRADLQDAVTAAFAHVTWVNLCLLQVVGRTDVKGADKLLSLLARVQALLKLPTDGSQSLIVPRLEYSAYEKLIAQMATVVESYNNEFVQLSLFIQQNEIMADYLLEQNKVFAAKEKDIAELESMIVDRKSQEMVKAFEKMNSLDAQLAQQVEEMDRAKEQMDAGIQKYKNDQVAKAFFSVIKCILSVGLAIVTGGAASGAAVAGTVAVVEKVSELANMLTKVTEILEGLEALAEILSAIKNLFEAIEDVNNIVEAPEMPEMPSAADWDIFENEIEAVAEQMPQTVSEVSLWKAKCKNVAAVCREISTTAAYIGQLEYDLFLHRKQQEIAAAQAKRLESIQPADLTNYLEMATQLDMRTTRLLVGMHKILTVQNGALQYHYLLEPKLLTGWPTMDRIRSRLVQNEQNAVLALERLGFSTDFVKTYVLSDVPVHLLLSGEDWNFNILEDDPTFPSNWSRVRIVYLEIKFSGDHLPITSTGEVYFLLQASRVFHDRLEGAYLKYEAGTPLEYQYAYILQTGKTTVTNKPTEEEDGKFLRMTPFTKWRLRLSASADENKGLSFPSAANALDSTTQISITFYLTAIRKISTRHGELGTTSDNE

SEQ ID NO: 793 - protein, 851 aa, Adiantum pedatum
MDVDYAAIYKDVNQVTRTVATSQCSEVMAIQRLYVRLNDLDVKGLRNVEVVKQVVVFADVVEVEGGDVLELPGSTQITIVCRVLHTKHPSGAVIRLSSLAPVKCHGREHRHASGPRTHSVTPMNGQLASDGQIVTILATEVVAPAGASLQVQCPVLVDAKIYDSDGYHPDFFYDLNGTASWSSLPFGGATGTTAATARSFQTTTIAPLSWITWTMNEVDWQPSFRVVLPETLPPRLLVNSSILLAMETNILASELISEFQREAVQTTAAVHQHTIWLDDQFQLAVRSSQRQDQLQSQQIRNLHFRVQSLLKLHRMDSNAPLVVPPLQYEQYDKLINLMTQAAQSYDNDFKNLNLFMQQNEILGNFLLDQNKAFAQKERDMEVHHSQLVGLQDRELELTREKFDSLLITLDQQNREMEKAQADLEAGIKQYRDRQIALAVFGALLAVAQLCFAVFTGGATAGAAVATAVQLSETAKVLQSVVKLLQRIEKVVTTLYAFIDFLSEMQSLEQIVNAPEMPELPTAADWYIFENEIVAVAETMPTEISEVPVWKAKCKNVAAVGREIITTAVYMQKLQYDLAVNRMLQQIAQQQAERLESLQIKDLDNYLEMATELDMRTTRILMGLLKVLSLQTGALSYHYLLEPRPLTGWVRMDAVWNALLKNATDAVVALSTSGASNDFVVRYTIKGIPVNLLLEGMDWIFDIPVDDPAFGESHWSRVRIEYIEMKFDSSSDGHLPTTTGGQIYFRLQAGRFFDDRLGHQILHYEAAVPLVYQYAYRLASGETTVSNRPSLSSSTHYMRMTPFTRWGLRLSASAPENRGLAFPTATTEDATTQITLTFYVTARRRISNFFLH

SEQ ID NO: 794 - protein, 766 aa, Adiantum pedatum
HYGFKANRYCAAGGVVIRLSSLSPVDCSAKLITDTTDIKPDDTVLQIDDFNWEVTPKTAAGRVVTILASHLVAPVGAQLRVHCPVNVEYQTNVIWPPVFTTVAGTVEWRISPYSAGASAAQSFAAATTSTFAGTAGLIWTVLKKWYPSFKIVLPEVIPLELLANSNIVLGVEVTTLVSELIMAYQRQATETVAATLHHVEWLNAQLLSAQSSGQLQALHFRVQSLLKLTVDDDNAPLVVPPLQYEVYDGLINVMTRAAESYDNAFVQLNLFMQQNEILGSFLLDQNKAFAAKERDMETHHSQLVSLQDAELTKTNESIKSMNNELAQQNQAMDKAKADMEAGIKQYKDRLIAEAVFGVFTAIAQVCLAIFTGGATAAAAVETAGKLSETAKALESAVKHLEKLQKIVQVINSITDFLSNLQSLNQLIEVPKMPDLPTEADWDMFENEIVAVAEGMPTEISEVPMWKAKCKNVAALGREIIRTVAYMQQLQYDLAVNRMLQNIAQQQAERLEGLHIQDLDNYTEMATELDTRTNRLLMGLLKVLSLQTGALSYHFLLPPRSLQGWVNMDTVWNTLVKNEYDAVRGLGSLGSAPTDTIQTYVVRDIPVGLLLEGNDWFFDIPVDDPAIPPPWFRVRIEHVELKFPTTNPIVHRPTTRNGEVYILLQAARFFSDRLIDEVLHFQATKTVSYQYAYRLDSGETTLHNRPTASSSTHYMRMTPFTRWRLRLSASAPQNEGLAFPTATTEDATTQITINFHLTALHRIQFRA

SEQ ID NO: 795 - protein, 881 aa, Adiantum pedatum
MAQGKELLTVDGVVDYEALYGEVNEIARAVRTHKVSCSEVMVINRMFVRLDTFSVEHLQQPGVVKSFIVVADVVEIEGSSSSLTLPGSSLILIVCRRLQLKNKNVILDLTWNLAATNVKSSQLPRCSIYTQHVDVPNAGSTLRIQVKRELKWSNGSSFTHYFGREFSYSNSTKTFSTTSSAPANYSVSSVGQPPASKLILVNSRKMNILTNDIRWKGFIDLQVNALPPLNDLAHPNVIEAFESNLLIVEMILNYQTNMQDLVTAAKDHVQWINQSFLEVVDWSNPEVGLQLKALLGRAQLLLKMPSDGSQSLIVPQLEYDGYDRVIQEMAKVAESYNREFRELSGLILNNEIIGQNILKQSKILGAKETEVQNLESLIVLRKEKELDRAIERLELLQNQLIRQVNEMETAKEKLDQGLKEYKHKQIARAFFQVLGAMMQIMGSCRLSSIPDFAVAFGGGISAAISAAEKVEDASVRNTLQNVANKLRNVEIVMEVVNSVKDLYTNASNLEDILNSPQIPDVPSSDWEIMRNDMEEVAAGMPTEVSEVSTWQAKSKNVVAVCEEICATAISISQTQCDLFVHVKQQEIAQRQAERLNQMQAVDLGDYLEMATQLDMRTMRVLICLLKMLGIQNGALQYQYLLAPKPFIGWPTIDTVRMEILRRVELAVLAKVELGSPVMLTRNYVIESIPVGLLISGDDWNFSFDASDNSVFPSTWSQVRIQYLEMKFTGEHCPITETGEVYLLLQASSKFEDRWKKQVFQYEAAAPLTYQYAYNLQSGKTTIPNKPHVEGTFLRMTPFTRWRLRLPASALENRGISFPTTTSLDNFISISITFHLTAIAQIQSKSLGIVYNLFDDDDDDDDEQGEGGEQGGGKSRGEEEVL

SEQ ID NO: 796 - protein, 890 aa, Adiantum pedatum
MAGAEDESMSTMYEGISTGSTAASDDELQDDMSFMYNYIQKSVDADRDSDYEAIYNGVNQIARAVGIRNRVESGEVLAIHQMFVRLDTLSVGNLLRAERVKYLIVFADVVEIEGADLTLPGSDLVLIACRLLRVKNQNVVLNLSWNIASSSTPPRCSICAQRVIITSSTAVANCTLRIQVMHALQWSDKSPFTQYFGRKFAYSSQNSSITAAPPNESSSSLGKPPSSRLILVNSKTMNILINNIRWKGYIDFQVGLPSSDDLIDPRVIEGIESTLLIAEMILTYQTNARDAVEAAKKHVQWINMALLQVVDSQNSEAGLRQKTLLARIQMLLKLSMDGTPGLVVSVLEYGIYDRVIQDLIRVAELYNNEFNQLNLFIQQNQILGDYVLEQSKVLAEREKDVEALESSIVARKQDELKESINTVESLEEQLQRLASEMEDAKDKMDKGLQAYRDKQIAYAFFTVLGAALQLGGSLKLSSSVEMVIGIGATVSEAVNATKEVTNAVASNNLMEVANKLVDVEKVIKVVNAIKELHDNETKLDDILTAPMMPVISSSDWDIMEDNIEEVAATMPTEVSEVVTWKTKSKNVIAVCREICTTAISVSETQYELFVHGKQQEIARRHTERLMKMKAADLGDYIEIAKQVDMQTMRLLIILLGNLAIQQGALHYHFLLAPEPLMSWPTIDTVRRHLIQQAEKAVWAEERMGEPVKLTQIYVLEDIPVSLLLAGNDWIFTIEPSETTVFPSNWYRVRIRYIEMKFTGENLPQSPETGRVYLLLQASSTFQDRSRGREVFQYEAATPRNYHFAYEVQSGVTTVHNEAAEGGRRFLMTPFTRWRLRLSASAIENQGVSFPVATSATISITFHLTCIVRVQSYRSQEDDEDEDEDEDEDGL

SEQ ID NO: 797 - protein, 883 aa, Adiantum pedatum
MVNERFLVDLDERSEEFVKDAQTRSTVSTEVDYEHLYANANQLARDLRTRNVRCGEVLAVHRMFVRLDSLDVQQLQQAERVKRLIVFADVVEIQGSSVALPGSSLVLIVCRVLHLKSRDVQLDLPFAWDTTAHDSPRCSIRAQQVVVSPSAAPPHLSSDGSLIIRVTHNMGWSNGSSFSQYIVRCFGYSESNSNSSVHINLPVATTRPPSFHWMRVDSEKVSIRINQNIDWTAHINFQVALPSADDLDNLHVVMGIESTLLIAEMILSYRSDRQDVVAAALEHTQWISMSLAQKEVVEGQPKSDLHELKLALLARAQMLQKLPLDGSQSLVVPQLEYGAYSEVIREMTDVAEAYNREFIQLHLFIQQNEILGDYILTAVRNLAEKEKDVASLEDAVVRGKEREIEIAMEKITTLEGQLLKQIEEMTDARDAMEQGVIVYRNKRIASATFEVLGAVLQIAGSIALFATGQIASGLGALGGGISAAVAAAEAVEDAASIKDSLLNVTDQLVEVEVAMEVVNAIQKLVASATDLEDLLAAPPMPIIYSSAWDIMENEVESVAAQMPTAVSEVPVWKAKCKNVVAVSREVCTTAIAISHLQYELFVHARKQEIALRQAERLAEMQAVDLGECLELASQADMRTTRMLINLLDMLATQNGALQYHYLLPPAPFVGWPAIDSVRTLLVQRRQQAIIAQTTMGPSYKVNTRVTLDSIPVGLLLSGEDFSFTIQAISEDTIATFPDVWSRVRIEDLSIVFTGGHQPSSSTTGEVYLLLQPSSSFHDRLRHQVLNYEAAAPRPFQYAYNLSTGHPTLTSRPHEEGLYLRMTPFTRWRLRLSSSAYQNRGISFPTATAPDSSTEITITFDLTAIVHPQTSVEYDNNPEIVDQP

SEQ ID NO: 798 - protein, 877 aa, Adiantum raddianum
MDVDYAADAMDVDYAEIYKEVNQVTRPVPTRVCSEVMSIQRMYFQLDDLDAKLLRNTEVVKRLYVFADVVEMVGQSVELAASVEVVILCRIFKTTRSDAVLRFLSLTSRLECDATPVYASANVVSHFFVRPRPGAADPRLLITIHATQLVAPARTQLRVQRPNVVLHRAQFWALEEIFMPGGVSTGATQPVLRPAVTQDGAMEWRISPYVAGGALAARSFHFTHPHVYRTSQDYLGFTGIFIPEPIPYDLLTNSNIWLGMECTTLICELIDKYQRQATQTVEAAHHHVAWLDKQLLSMGNRITSSNIPKKNVQQIETLHFRVQSLLKIYRRTANGVDAPLIVPSLQYDVYDRIINLMTRAAESYDNDFKQLNLFIQQNEILGSFLLDQNRAFAQKERDMENHHLQLVTLQGHELQATGDKLQALNRQLAEQSEAMDQAKADMDAGIKEYRDAMIANAIFSVFKAIAALCLAAATGGAAAGAAAGAAVDTAAQLSELARVLQSVVKLLKRIENVVKTINAITAFLTELESLNQLIELPEMPEMPTDADWSIFENEIEAVAEGMPTEISEVPAWKAKCKNVAAVGREIITTVAHVEKLQYEISVSKMLQDIAQQQAERLEGLRIEDLDNYLEMATELDMRTNRILMGLLDMLSLQTGALSYHYLLRPRPFTGWVRMETVWRTLLQNESDKLVAIAALGAPQEFSRSYVVENIPVSLLKEGADWIFDIPVHDPVFPSLWSSVRIDYVEMKFPPDTTHLPTTKGGKVYFLLQAARFFHDRLQEDEVLHYQAAVPLVYQYAYHVESGETTLSNRPPQASSALYMRMTPFTRWRLRLSASAPENEGLEFPTATTEDATTEIAITFFVTARRRISTRVDSSSTT

SEQ ID NO: 799 - protein, 874 aa, Adiantum raddianum
MAAVQDFSDVEDFSELYKNAEHVQMGSVPDYYEIYKNVNQVTRAVASSQCSEVMSIHRMCFKLDMLDVKLLTKADTVKRLIVFADVVEIEGDMVELPASTEVTIVCRILSVKKENRQVEENVQVFFNLLESVVTAGDRNDRPAGISLSTSPEFRFCIYAQQVVSNSVVHLRVTQPVTYSDPGFTPPDADTAWMWLSMRIRNLPSRQHMLNANGPRKANGMPVWQTSRNVIERGPEWSRISVLAPVSVPLHTLADPTVILGMQSTLLIAELILSYQTDLPDTVSAAVQHVEWLNTKLLRVVDDNTLDMETTQELLALLARGESLLKMPVDGSHTLIVPRLEYGQYRGLISSMATVAEAYNREFMQVDLFIQQNEILGSYLLQQNKALAERERDMEAFNGLVVARKQEELRAAEERMKELEALLTQQTEAMDQAQEDMEAGLKRYRDEQVARAFFSVLKGVFAIGVAIATGGAAAGPAVKGAVGAVNAVSGLARTLSTVTKIMEMMVQVIEVLNAMKDLIAAISELNQMVEAPQMPTMPSTVEWDIFENEMEEVAESMPEEVTEARTWKTKCKNVAAVCREISTTAAYIGQLHYDLFVHYNQEAIARRQAERLEAIQPANLTNYLEMATQMDMRTSRMLMGLLKVLMLQNGALQFHYLLQPKPFTGWVTMGMVRDALVQHEADALLARERLGPSTDFTQTYVVSDIPLSLLLEGEDWTFHIPPDDSTFPLSWSRVRIRYLEMNFTGGEEFHRPTTNTGRVYMLLQASRFFQDRLLGEVLHYEAAVPLRYQYAYDLKSGETTTSNRPSDQHDGEFMQMTPFNQWRLRLSASADENRGLAFPTAPPDQLDGSNTQISITFYLTAVRRAATRTSEISSQ

SEQ ID NO: 800 - protein, 882 aa, Adiantum trapeziforme
MATFEEYHPEQYMELYKDFNQVRERLSLEMMEFSEVMVIHRMYLKLEELDVGHLEGAEKVKHLYVFADVVEMRSREDELEPVARLPGSVSVAIICRVLWIRRQGSVTRETLIAFPHLKVHLKMTGARSVNVYRTDHAAETDDGFVFCIDAGSIQRTSDESTTSGILFSLFSYHFVRSPTLDGKNITFSSDTDSSISNLPVVHFPFYTQGWRWSVTTAGILSFAPSSVTSTTTVHATGSLQTYDFTHLTFAPGFWIMRGIPESLLKDDKLLLFMQTSLLISELAELAHPSSETRNAVLTHVEWLSKILINGESKTEGTEFHHEYLALSFRAQYMLKTARSTRSLVVPQLQYDVYGPLINRMAQVAQIYDDAINQLKLFVSQNKILGSYLLEQNKTFAARERDMEVFYAELISQMKIELDSTLLKMDQLGAQMEAQSADMEEAQREMEEGLRRFRNRQVAEAMFSVFRAIGAIALAFLTGGATAPAAMSSARRAVTAAEQAARALERVLDILEGLQAVMEVVAIIKDLVESLQNVGQLVDAPDMPEMPTEADWGIFVNEIEGVAEEMPEEVSEVSAWKTKCKNVAVLGRELMTTAAYISRLQYDIQEHAMLQEIARRHADRLSTIQAADLSSYTEMVMQMDMRTTRIMVSLIKVIYMQNAALMYQCLAPPTQVWQWPSLSMETVWTMLMQNEHVAILGLTRLGPSFDFKRIYVVRDIPVSLLLAGQDWEFEIPVSDHTTFPSTWSRVRIQHLEMKFDAGGGAHQPITDTGKVYILLQGSRAFHDRNQVGRLPLLYEAALPLDYHYAYRLDTGETTLSNLPSTNFLDTYMRMTPFTNWRLRLSASAEENKGLDFPTARQESSIKEEATTQIAITFHVSAIRQISF

SEQ ID NO: 801 - protein, 893 aa, Adiantum trapeziforme
MAAPAATEHGGLDYRELYKDLNQISDSLMLDQMEFSEVMVIHRMYIKLEELDLGHLEGADKVKRLYVFADVVDVEDGGNFIDVGPLARLPGSMTVVILCRVLYVRVLPLAVGGNNNAMRMQLPHMKFRVVEIATGRVQLQRVEQSGDELALCIHARIIQCYIRPSASATIRPPYSLRFLHFAPGRGVPGIVFSSEPRSMVDAQVELFQVYSHLGHVFQAPGPDQIVSINPASLATDWYYVSVSFPDRVVLSSSNAARGELEPAFSLLKPDIPVVVLTDPNVSLLIQTSLLIAELVELAHPSADTTAAVAEHLQWLNSLLLQATAEVKEGTASHDEYLGLLFRAQYLVKMMGRARSLVVPQLQYDVYSNLINRMAQVAESYDQALRQFRLFILQNKILGSYLLAQNRAFAEREKDMEVFHSELLSQRKLELETAIQKMDHLSIQMETQSADMEQAKKDMDEGLRRFQNAAVANAMFAVFGAIAAISLAFLTGGATAPGAVAAAKGAVTAAGALARALERVVEILEGLQAVMELVYLIKELMNSLKEVGQLVEAPEMPELPSEADWGIFVNEIEGVAEQMPTEVSEVSAWKTKCKNVAVLGREMITTATYISQLQYDIKVQDMLQGIARNQADRLLSIQAADLSNYTAMVTEMDMRTTRMLVALIKVVHMQNAALMYECLSLPMHVNAWPVTMETVWSMLVQHEHAAILGLMRLGPSFDFMSTYVAKDIPVSLLLDGEDWELDIPVDDYNTFPSTWSRVRIHHLEMKFVQGNEGSAGNIIHQPITDTGSVYLLLQGSRLFRDRNQSDVLNYEAAMSLDYHYAYRLDTGETTLSNLPSQDFTRTFMRMTPFTTWRLRLSASAQENQGLAFPTATSADSTTQIVITFYISAIRRISL

SEQ ID NO: 802 - protein, 833 aa, Asplenium australasicum
MRCPLNADITNSSRDGRRRLQCAKMAAGDYSVLYQDVNQISIRLEKMDFSEVMAVHRMFVRMDDLDVSSGTGLLSGAEKVKRLYVFADVVELPSKQLRLPGTDLIVILCRIFVTNGRHSTELFLPSMNMSMVAPGTGSIRGVILSPTTVLTTSSDALQFKLQSGSMTSVMRLKDVSVAATLTCNVQAASASMPLTVKTTGTSPGNICVLGMSTAVVVPESAVAVITDANILLGMQVTVLIAELVKIAHNSDVLIAAVTRHVEWLNHLLVQAHAAAPSEDVVALLYRTQGFIKLRNEGLIVPRLQYRMYKDLIDRMVQVAQSYDQDFKQLKLFVEQNKILGSYLLEQNKAFAEKEKDMDAFHSQVIDLRTSELESTIERMDDLSKQMEEQNAAMEQAKADMDAGLIAYQNKQVANAVFAVLGAIASIGLAFATGGATAPGAVASAGAAVTAAGKAAEGLKKVVEILEGLQAVMEVVAVIKELVQSLQEIGQLVDAPEMPDLPSDAEWEIFVNEVEAVAEQMPTEVTEVPAWKAKCKNVAALGREMSTMAAHIAELQFEIQVQEMLREIAKKQADRLSSIKPADLTNYLEMVSEMDMRTTRMLLELIRVLYIQNAALQYEYLQTPAPLNAWPVTMQTVWGLLVQQETAAINGLLQMGAPSDYTQEYAVRDVPVRLLLGGGDWEFELPVRNADFPLTWCRVRIRYVDMRFDAAAEHLPVTSTGEVYMLLQSSRFFEDRAKRENEFISYEGGMGLQYQYAYRLATGDATVTNVPSEEYANTFMRLAPFTRWRLRLSASAPENKGLAFPTATLADATTRIKITFHVSAIRRISTRVAV

SEQ ID NO: 803 - protein, 850 aa, Asplenium australasicum
MASFPDYREIYKNVNQVTRAVASRQGSEVMSIHRMYFKLDELEVERLTEADTVKELVVFADVVGIEGQQVKLPASRTVTIVCHILHVKQEAVKLRFDSFGPVDCDRGWLPGIGEAALILSNSPQVRLSIYAQQVVCNTTRAVVQVAHPVTVSQTVSPHNPSRYAIPGTMKWQVEIASDQPDLSAAERSYELRTERFWDVMEKVWRIDQQEWSLFTHLLQGPVSIPPAILGDSNIILGMQSTLLIAELVLSYQTRADDTVSAANAHLQWLITNLLQVLDDNSLDKETREQLLALQARAELASKLPLDGSHTLIVPRLEYGQYQGLIKSMAAVAEAYNSEFMAVNLFIQQNEILGSYLLQQNKAFAARERDMDTFHGLALARKQQELRTAQESMEDLNAQLTQQTEAMDQAKRDMDAGLKKYRDEQVAKAFFSVLKGVLAIGAAIFTGGAAAGPAVNAGVDAVKGVSSLAGKLDMVIDIMERMEKVMEVLNAVNDLVTALSEINKMVEAPEMPSVPSTYEWDIFENEMEEVAESMPTEVTEARTWKTKCKNVAAVCRAICNTASYIGQLQYDVFVQSNQALIAGKQAERLEAIQPADLTNFLEMATQMDMRTSRMLLNLLKVMTIQNAALLFHFLLPPVPFTGWVTVDMVRNALVKHEADALAARERLGPSTDFVQTYVMSDIPISLLLDGDDWIFTIDPADGSTFPLSWSRVRIQYLEMKFTGGEEFHKPTTSSGRVYILLQASRNFQDRLHGDVLHFEAAVPLRYQYAYDLQSGETTVSNRPSQQHDGEYMQMTPFGQWRLRLSASAVENQGLAFPTAVATDLDSSTTQISITFHLTAVRRIDTRALVEL

SEQ ID NO: 804 - protein, 850 aa, Asplenium nidus; identical to SEQ ID NO: 803

SEQ ID NO: 805 - protein, 886 aa, Athyrium filix-femina
MEYSALYGDVNQVSLRFEKTEFSEVVVVHRMHVRLAELNVTLGDNNILLQGSDRVKRLYVLADVVELPPIFSTSMSLPGTVSVVILCRILYLPYLEDASSASGWAVHAALLRLRVVETHAGFAQVFTIPANDSSAAAPADIGLYIHADRIIYRDDPGRSIPVIEVRVGGDSRFSPFLPGSPEIRLSSVQYVREFSKGQPVAPEDSELQRSDEIELIAPSGSEQQLRAAFGASVGMNLLFHFSSSFDILSLDPVPAALLTDPNIITGMQMNMLIAELVLTAAHNSPQLIKVVTRHVEWLNKMFLQLASPNDDILALLFRVQAYQKMAKQPHPVVPRMRYSRYEGLINQMVQIAQSYDQDLKQLKLFVAQNEILGSYLLEQNKAFAAKEKSMSEFHLQVSDLRRSELNDAIQKMTGLGEEMEVEKEAMDQAYKDMEQGLQEYEKRQIVTAVFAVISAISLCALGFVTGGATVAAVPGAVANAAQAVSAAVSLANKLQKVMGILEIINQVVQTAVAIKEVIELFDNMGQLLEAPEMPEMPSNYDWLIFVNEVEAMAEQLPVEVNERIVWKAKCKNVAVLGQEMCTTGSHIADLQYQIKVEEMLREIAQSQAERLEGISSADLSSYTEMVSQIDMRTTRLLFQLIKVLHIQNAALKYEYLYAADEHLVSWPVSMETVWTMLLQQQRLSLLGWENLVGTNNLPNDDTRTYVVKDIPVEVLLSGRDWPFVIHEEDYTAFPSGWYYVRINHVELKFEQQTAGSTDIVIHQPSTNTGRLYMLLQSSRFFHDRNQGVKMEYEGSRGLSYPYAYNLNTGETTHNNIPSDQFKNIFMQMTPFTTWRLRLSASAEENEGLVFHPPPTSPTSTTQVSITFHVTRIRRIDRSTVHQKHVS

SEQ ID NO: 806 - protein, 849 aa, Athyrium filix-femina
PTCQSPEERRGGEATVRIRGRGGNGGPERAASGVEPSHHIVPSPQDKAKWCSDPTVVLEPGGLLGEAPKQRYNGYRARGHCAADRQVLESDAKEWRACSKRPSNTGNTDIEMEDTVLQIDKYWEVTPKSGELAANGRVVTILASHLVAPVGAQLRVQCPVNVEYQTNVIWPPVFSTIAGTVEWRILPYSAVAAAVHSSAAATTSTFAGTAGLIWTVDEVKKWYPSFKIVLPEVIPLQLLANSNIVLGIEVTTLVSELIMTYQRQATETVAATLHHVEWLDAQLLSASQAQSSGQIQALHFRVQSLLKLPMDDDNAPLVVPPLQYEVYDNLINLMTRAAESYDNAFTQLNLFMQQNEILGNFLLEQNKAFSAKERDMESHHSQLVSLQDAELTATSENIKSMNNELAQQNQAMDKAKADMEAGIKQYRDRLIAEAVFGVLTAIAQVCLAVFTGGASAAGAVETARKLSETAKVLQSVVKHLERLQKIAQVINAVTDFLLNLQSLNQLIELPKMPDLPSEADWDMFENEIVAVAESMPTEISEVPMWKAKCKNVAAVGREIIRTVAYMQQLQYDLAVNKMLQDIAQQQAARLEGLHIQDLDNYMEMATELDMRTNRLLMGLLKVLSLQTGALSYHFLLPPRQLNGWLNMDTVWNALLNNEYDAVKALGSLGSAPTDTMKTYVVRDIPVGLLLEGNDWFFDIPVDDPAFPPPWFRIPIEHVELKFPTDSSQCVHLPTTHSGQVYILLQAARFFSDRLKDEVLHFQATKPVSYQYAYRLDSGETTLSNRPTLSSSTHYMRMTPFTRWRLRLSASASQNQGLAFPTAATEDATTQITINFHLTAIHQIQYRAAQ

SEQ ID NO: 807 - protein, 513 aa, Athyrium filix-femina
TGKHHTENGTIEFTNGDTKRRHGPSQRGHGCRYKSFTARLLNLDDHLASLLHTYGRGIHVPSSGLVYTHFNLQLISCRTMICIKHAGLRRFQNRRVAEAMFAVLGATAAIGLAFVTGGATAPAAVTAAGNAVNAAGQAANALRKVVEILEGLQEVMAMVALIKELVDSLQDIGQLVEAPEMPVLPSEADWLIFENNVEEVAEGMPTEVSEVSAWKTRCKNVAVLGRAMVSTAAYISQLQYDIKVEAMRQEIAKRHAERLLAIQPADLSSYTALLTHMDMRNTRMLLALIRVLHIQNAALMYHSLSLPTHMNAWPVTMDTVWRMLVQHEHAAILGLLRLGPSFDFMRTYVVKDIPVSLLRDGEDCEFNISVQDDTAFPSTWSRVRIHHLEMKFVQEAHVHQPSTHTGKVYILLQGSRIFHDRNEDDVLHYEAAMPLDLHYAYRLDTGETTLSNLPSNDFIRTFIRTTPFTTWRLRLSASAEENKGLDFPTALTVDATTQIAITFYVSAIRRISL

SEQ ID NO: 808 - protein, 882 aa, Athyrium filix-femina
LLDPVLSATEVVDYEALYSEVNEIARALWTLKVRCSEVMAINRMFVRLDTLSVEHLQQPEIVKSLIVVADVVEIEGSSSLTLPGSSLILITCRLLRVKQKNAVLNLAWNLAATNANTSTTSLPRCSIYTQQVDVSNGSTLRIQVKRELKWSNGSPFTQYFGREFSYSSSTKNYSTTSAPAAADYSVKSVGQPPESNLILVNSKKMNILMNDIAWKGFIDLQVAMPSLNDLAHPNVIEGIESNLLIVEMILTYQTNVKDLVTAAKDHVEWINKGILEVVDWPNSEVGLQLKALLGRAQMLLKMPSDGSESLIVPQLEYSGYEKVIQEMAKLAESYNTEFRELNALILNSEVIGQNILNQTKILGAKEREVQNLESLIVLRKQKELDQAIERLEILENQLIRQVDEMEAAKKKLDQGLQAYKNEQIAMAFFSVLGTMMQIAGSARLSSIPEIVVGIGGGISEALSAAEKVKDAIVSNTLQDVANKLRNVERVMEVVNSVKDLYTNATNLEDILNAPQIPDVPSSDWEIMRNDMEEVAAGMPTEVSEVSTWQAKSKNVVAVCEEICVTATSISNTQCDLFVHVEQQEIAKRQAERLNQMQAVDLGDYLEMATQLDMCTMRVLICLLKMLGIQNGALQYQYLLAPQPFIGWPTIENVRMEMLRRVELAVLAKVQLGPPVTLTRNYVIESIPVGLLMSGDDWNFSIDASDNSIFPSTWSQVRIRYLEMKFTGEHHPITETGEVYLLLQASSKFEDRLKTQMFQYEAAAPLTYQYAYNLQTGETTLPNLPHEEGTFLRMTPFTRWRLRLSASAYQNQGLSFPTTTSLDNSISISITFHLTAIVQIQTRLAGGSVYNLFDDDDGDDDQQEGGEQAGGKSGGEEEAGSPI

SEQ ID NO: 809 - protein, 821 aa, Athyrium filix-femina
MAAAVDYESIYKNANEIARVVGTDKISCSEVMACHRMFVRLDTLSVEQLVGSSNVKQLIVFADVVEIQDSSFTLPGSTQIFIACRILDVKANKDIDLTLDWQVVNNAGQTSIPRCAIYAQNIVSSSSTKSGTILLKVKYQRSSSSAPVYFGREFSYSAASTAVVDFSTAQDNLELINRKNWVVNINGMEWSAYVDLQFGLPSVEELAEYNILTGLQSTILISEMILNYRTDLPDTVTAAIAHVQWANLCLLPVVGMTNLEGAYQLPSLLGRAQSLLKLPTDGSQSLIVPRLEYSGYEKLIAQMVTVVESYNNEFVQLILFIQQNQIMGAYLLEQNKAFAAKEKDIAELESMILDRKKQEMDNAFQKMEALNKQLEQQVEDMNQAKEDMDVGIQKYKDEQVAKAFFAVIKGILGVALAIATGGATSAGAVAGAVDAVEKVSQLAKALQKVMDILQGLEELAAILSAIKELLESIEDLNKMVEAPEMPEMPTMADWDIFENEIEAVAEQMPEEVAEVPVWKAKCKNVAAVCREISTTAAYIGQLEYDLFLHGKQQEIAEAQAKRLESITPANLTNYLEMATQLDMRTTRLLVGLLKMLTVQNGALQYHYLLPPKPFTGWPTMDRIRSTLVQNEHNAVLALEQLGFSTDFTRTYVLSDVSVYLLLSGEYWIFNIPVDDPTFPSNWSRVRIVYLEINFTGDEGSTHFPSTNTGEVYFLLQASRMFQDRLEGEYLQYEAATPLQYQYAYVLQTGETTVPNKPSQEEDGRFLRMTPFTSWRLRLSASADENKGLSFPSANALDSTTQISITFYLTAIRKINTREGIE

SEQ ID NO: 810 - protein, 882 aa, Blechnum cartilagineum
MEYSTLYGDVNQVSLRFQKTEFSEVMVVHRMYVRLAELDMTTEPYFEMIAGSEKVKRLYLLADVVELPSSALNMRLPATISVIILCRILYIPDINSPYLACGLHFPLMRLRVVETSEGVGRAFPLPSNDGSGAAASIGLYIHAHRFIYRQDTTTGDSIQPLQLRAIGGSTFSTQVRPDWPETLEVSSLICWLSLTKGPRLTPADSDLQRSDEIELLAPASPDKVNIVFAGLAPGNLLSLYLLVDNTSAFSFFPTPVPNVPADVLTDPSIILGMQMNMLIAELVLAAHNSQQVINVVTKHVEWLNKILLQVASPSDDILALLFRVQAFMKMAKQPRSVVPRLQYHMYSSLINRMVQVAQYYDQEFKQLKLFIAQNEILGSYLLEQNKAFAAKEKDMSVFHSQVVSMRRSELNSAVEMMDKLSLQMEKENEAMNEAKDAMVEAIEEYERKQLANALFAVLGAIASVALAFATGGATAPGAVAAAGAAVTAAGKLAAGLQKVVEILEGLQAVMEIVAAIKDLVESLQNMGQLIDAPEMPELPTNADWQIFVNEVEAVAEQIPTEVAEVPVWKAKCKNVAVLGQEMCTTAAHIGELQYQVMVEEMLQEIAQRQADRLEGISPTDLSSYTEMASQIDMRTTRVLLSLIRVLYIQNAAIKYEHLFAASGQLDSWPVSMETVWTMLLQQENAALLGLLDLGPSNDFTVTYVVKDIPVQLLIDGADWNFEIPVGDFTAFPAGWSRVRIRYVELKFVQQGSGEGNIVIHQPSTNTGLVYILLQSSRFFHDRKREEVMDYEASMGLAYAYAYDLVTGATTLSNIPSEEYANTYMRMTPFNNWRLRLSASAMENQGLVFPTATSPDSTTQIAITFYVTAIRRIDTRIDTQRQE

SEQ ID NO: 811 - protein, 865 aa, Blechnum cartilagineum
WPCVGGSRAQPSVSAGENHVMGNASSTDYEHIYRNANNISRMVATPVCSEVMSVARMFVRLRDLDASRLKNPEVVKELYVVADVVDMEEYNDLTLPGSERIYLICRVFTWRRNQPPPTTVRIRTPWLNLSSCSKLEICPLRHDRQAQTSPAFQCFARAKHSTTSEIAPAVLFLHAAHIYTSNPDTDTSHLNVVLQAQESAQYTLMSADQTPSGEEIFWEVETYPLLPRSDLNSTILSAQEANVLVIELILSYITHATETVKQASLHLEWLNKLLNYALNDTSSASTGSLDDEALDRQLHNLSFQVQFLLNQPPTGAGLIVPRLQYYAYSNLVGTMARIAENYDKEFRQFSLFIEQNDVLGTYLLQQNKAFAEKEREMEVFHLELQQVKKDDLTRALAKLERLEVDMREMNAAMEQAERDMEADLVQYRNRQVARAVFSVIGAIAQLGLAFFTGGATAGGAVAGVANAVSQVTDSAALASLRRISETLEKLVLVTEFLVAMRDLLNAVMDIHQGPPEVPTLPEMVSEAEWAIFENEIEAVAAGMPAEVSSVLTWKTKCKNVAALGREMITLATIIVDLQHDIKVHGLMREMAQNHAQRLKALQPVDLKNYQEMATELDMRTTRMLLGLLEVLSLQNAALRYQYLLPPSPVTIESTSLTMSTAWTLLLQHESASVISLADLGFATDQEVAYIVKGIPVGLLLDGEDWDFPISVRDIAEGAAFPADWSRVRISHVEMKFVKPGAAPADEEETVHQPTTNTGKVHMLLRGEQLFADRKRGESLKYEAAVSMEYQYAYRLDTGETTQSNRPSQEFGDKLFMQMTPFTRWKLRLPTAANENRGLAFPTASAENATTQITISFHVSAIRTIF

SEQ ID NO: 812 - protein, 842 aa, Blechnum cartilagineum
SVFCRYQIHLLCVELRFGSCLLAGSIQHLSMGNSIAAAEARNYEEIYKDANHIGTKSLITAVCSEVMTVCRMYVLLDDLDVKVLERAEEVKVLYVVADVVELRGDAVQLPPSVQLILSCRVLLFSSGNGWPQVAILQGPLVHYNGNYSPVTGNWSATPLLEQDTYRFFLHGQQLLILSGTSGRSSGDVLSEDGKKLQLQSSTAPILPPRWVMEDPHILSGLEASVITSELIVGHMTHAVDLVAEVKLHVEWLLLLLRHALNETMTNAEANHLLRSLFFRVQSLVRMATAAQNNTLVVPRLQHHAYSEYINRLAELARSYDTDFKALTLFIQQNEILGSYLLEQNKAFAEKERDMEVVYTTLNDIKMSELIQALGQLERLGEEMGKMSAEMEQAREDMEEGLKIYRNKQVARAAFSLLNAIAQIGLAIFTAGATTGLAASAVANAGQAITQATEAVQQLRRIFETIEKMLLLAEVLVAMRDLITAMNDGGELGTLPEWPEMPTTAEWEIFENEIEAVAAGMPEEVSETLVWKAKCKNVAAIGREMVTQAMLVSQLEYDIKVHSLLQEVAQNQAARLEAIQPTDLIDYQEMAAQLDMRTSRILLSLLQVLALQNGALTYSYLMPRTSLSARSVSATMSAVWGLLLHQGQATLVALGELGSPSTRSVEYVVKGIPVGLLLDGEDWDFTIPVADTLHFPSTWSRVRISHVEMKFVKTGGTAGRDEELQVHQPTTHTGEVYIVLRSELFFQDRRKGQYLKYEATVPVIYHYAYNLATSETTEDNRPDEEFARVFMRMTPFTRWKLRVSTSARENQGLAFPTAITPDATTQIAIRFYLSAIRDFDWNH

SEQ ID NO: 813 - protein, 845 aa, Blechnum cartilagineum
MGNASSTDYEHIYRNANNISRMVATPVCSEVMSVARMFVRLRDLDASRLKNPEVVKELYVVADVVDMEEYNDLTLPGSERIYLICRVFTWRRNQPPPTTVRIRTPWLNLSSCSKLEICPLRHDRQAQTSPAFQCFARAKHSTTSEIAPAVLFLHAAHIYTSNPDTDTSHLNVVLQAQESAQYTLMSADQTPSGEEIFWEVETYPLLPRSDLNSTILSAQEANVLVIELILSYITHATETVKQASLHLEWLNKLLNYALNDTSSASTGSLDDEALDRQLHNLSFQVQFLLNQPPTGAGLIVPRLQYYAYSNLVGTMARIAENYDKEFRQFSLFIEQNDVLGTYLLQQNKAFAEKEREMEVFHLELQQVKKDDLTRALAKLERLEVDMREMNAAMEQAERDMEADLVQYRNRQVARAVFSVIGAIAQLGLAFFTGGATAGGAVAGVANAVSQVTDSAALASLRRISETLEKLVLVTEFLVAMRDLLNAVMDIHQGPPEVPTLPEMVSEAEWAIFENEIEAVAAGMPAEVSSVLTWKTKCKNVAALGREMITLATIIVDLQHDIKVHGLMREMAQNHAQRLKALQPVDLKNYQEMATELDMRTTRMLLGLLEVLSLQNAALRYQYLLPPSPVTIESTSLTMSTAWTLLLQHESASVISLADLGFATDQEVAYIVKGIPVGLLLDGEDWDFPISVRDIAEGAAFPADWSRVRISHVEMKFVKPGAAPADEEETVHQPTTNTGKVHMLLRGEQLFADRKRGESLKYEAAVSMEYQYAYRLDTGETTQSNRPSQEFGDKLFMQMTPFTRWKLRLPTAANENRGLAFPTASAENATTQITISFHVSAIRTIF

SEQ ID NO: 814 - protein, 812 aa, Blechnum cartilagineum
MGNSIAAAEARNYEEIYKDANHIGTKSLITAVCSEVMTVCRMYVLLDDLDVKVLERAEEVKVLYVVADVVELRGDAVQLPPSVQLILSCRVLLFSSGNGWPQVAILQGPLVHYNGNYSPVTGNWSATPLLEQDTYRFFLHGQQLLILSGTSGRSSGDVLSEDGKKLQLQSSTAPILPPRWVMEDPHILSGLEASVITSELIVGHMTHAVDLVAEVKLHVEWLLLLLRHALNETMTNAEANHLLRSLFFRVQSLVRMATAAQNNTLVVPRLQHHAYSEYINRLAELARSYDTDFKALTLFIQQNEILGSYLLEQNKAFAEKERDMEVVYTTLNDIKMSELIQALGQLERLGEEMGKMSAEMEQAREDMEEGLKIYRNKQVARAAFSLLNAIAQIGLAIFTAGATTGLAASAVANAGQAITQATEAVQQLRRIFETIEKMLLLAEVLVAMRDLITAMNDGGELGTLPEWPEMPTTAEWEIFENEIEAVAAGMPEEVSETLVWKAKCKNVAAIGREMVTQAMLVSQLEYDIKVHSLLQEVAQNQAARLEAIQPTDLIDYQEMAAQLDMRTSRILLSLLQVLALQNGALTYSYLMPRTSLSARSVSATMSAVWGLLLHQGQATLVALGELGSPSTRSVEYVVKGIPVGLLLDGEDWDFTIPVADTLHFPSTWSRVRISHVEMKFVKTGGTAGRDEELQVHQPTTHTGEVYIVLRSELFFQDRRKGQYLKYEATVPVIYHYAYNLATSETTEDNRPDEEFARVFMRMTPFTRWKLRVSTSARENQGLAFPTAITPDATTQIAIRFYLSAIRDFDWNH

SEQ ID NO: 815 - protein, 817 aa, Blechnum cartilagineum
MAAGKTVPMYNHDNQSATIWAEGEMVWAERETSDLLCVNWPYILLDDLGVSRISNPSAIRHVVVIADVVEIDQPLVSLPGSLSITLVCRILRVRQAAGAVLQLRHLQAEWATLSQGQSAQLHLYAQQLVGSLEVHQPVMHTIEPEIPETGLPPIGPPFPPIIASSYMIWAISPYTNASQSKPASLTLHGIVVTHSDEWHNRFKVIVPHSPPLEAFEGVDILLAIEAGLAVAETILTFQTHARERVEAARRHAQWLNQLLQELLDSGRSLKEQILGQLFRTQVLLKLPVDRSQTDAVPRLQYERYGSLINRIAREAESYITEFKKMSLVMQQLDQTARGRQLLAMMETFAANESAMEVEETIYLEDAAVLETRRKIWKRQLEKLQAEMEQANQDMNEGLTGYNDRIDANAMFAILKAVASIGLAMFTGGATVEVAVAEAAVAVSLVSGTNAGRLQNAIKTLQVLVGVIEVLVALNSYFSQGQIEQIQNARAMPQLPSEAEWSSFEDDIEAVAATMPKEASEVPTWKAKCKNMAVFCRELTSTASDLALLRSNMRVHDIRKDIAMIYMERLPQMNPAENFKDYAQLVALLDVQNSRILLRLLDMFVLQNGALGYEYLFPVTRLISGWPKVENLSTMLARSEAEAADYLLTEVGQQTNFSATYAVPEIPVGLLQNHDDWIFTIPINGSIVLSDRWSRIRIHNVDIRFRQGALQPSTVDDQLHILLEAAPTFRDRRKQDILDFKAVVPASYTFAYHLRTGETMPTPEVSDQYPLMKMTPFTQWRLRLSDQNHGLAFPTALSPHDTTVISLTLFFSRIVTDW

SEQ ID NO: 816 - protein, 507 aa, Blechnum Gibbum
VCRALISCIQKKIGKTRSLVVPQLQYDVYSSLINRMAQSAESYDQSLRQFKLFIEQNKILGSYLLQQNKAFADKERDMDNFYSELISQIRKVELQSTILRMDQLSLQMQTQSEDMEKAKDDMDKGLRQFQERQVANAMFATIHALASITLAFVTGGATAPGAVAAAGNAVREAGQLARALEKVVGILDGLQVVMEVVSIMKDLVTSLQDLGQLVEAPEMPDLPLQSDWFIFENSIEEVAAEMPTEVSEVTAWKTKCKNVAVLGRKMITTATYISQLQYDIMVQGMLQEISKSHGDRLASIQAADLQSYTAMVTQMDMRTTRMLVALIKVVYMQNAALMYQSLSPPTYVNAWPVTMETVWSILLQHDHAAVLGLMRLGPSFDFMRTYVVKDIPVSLRRDGEDWEFNIPVKDYTSFPSTWSRVRIHHLEMKFVTEGVNGAAHVHQPITDTGSIYVLLQGSRIFHDRNEGEPIDYEANLPSQEFTKTFMRMTPFTNWRLRLSASAEENKG

SEQ ID NO: 817 - protein, 851 aa, Bolbitis cladorrhizans
MASLPDYYEIYKNVNQVSRPVASRQASEVTSIHRMYFKLNLLEVALLTKADEVKELVVFADVVEMEGGKVELPASRIVTIVCRILSLKREDVELGFKFLGPVECEEGWQVGLNSEMAYIRRTSPQVRLSIYAQEVVHNSTGAILRVTHPVTVRQRVSPHRPSQYTPGTMKWQINISSAHADLSTAQRSHELRTQRFWSEPERTWLINPQEWSPFTFFLPPGLLPLAILGDSNIMLGMQSTLLIAELVLSYQTHAQATVSAAHRHLQWLTTNLVQVLDDDSLENEIREQLLALLARAELASKLPLDGSQNLIVPRLEYGQYRGLISSMAAVAEAYNSEFTAVNLFIQQNEILGSYLLQQNKAFAAREKDMEAFHGLVVERKRQELSSAQETMEELNVQLTQQTEAMDQAKEDMEAGLKKYRDAQAARAFFAVMKGVLEIGAAIFTGGATMGLAVQGGINAVKAVSSLAGKLDMVLQIMEGMEKVMEVLNAIDDLVAAVSEINKMVEAPEMPSMPSTHEWDIFENEIEEVAESMPEEVTEARTWRTKCRNVAAVCRAISTTASYIGQLQYELFVHSNQELIARRQAERLEAIQPADLTNSLEMATQLDMRTSRMLLNLLKVLTLQSGALQFHFLLPPTPFTGWVNMGMVRNALVKHEADAVAAQERLGPSTDYVRTYVMSGIPVSLLLDGDDWIFTINPLDGSTFPLSWSRVRIRYLEMKFTGGEEFHKPTTDSGKVYMLLQASRNFQDRLRREVLHYEAAVPLQYQYAYHLTTGETTVENRPSQQHHGEYMQMTPFGQWRLRLSASAFENRNLAFPTAANTDLDAATTQISITFFVTAVRAVDFRSLDDQDM

SEQ ID NO: 818 - protein, 406 aa, Bolbitis cladorrhizans
WCSRCIFFFTGGATAGAAVAQATRAAQSVIKLTTALKKVMDIVEKLQEVMEVISAINTLWNSLQELNNIVEAPKMPELPTEADWDIYENSIEEVAASMPTEVTEVQAWKCKNVAAVSREMTKTAVYVGQLQQMILVTGLQQDIARKQAERLESMQPQDLSNYQEQATLIDMRTSRILLALLDVLILQNGALRYECLLPPEPITGWPTMDDVRRILITQEGLIVNSHTILGPSYNLEVGYNVSGIPVDLLLDNDEFQFTIPISDRVFPLSYFKVRVRYLEIRFVNDSGNHQPTTLTGEVFISLQASRSFKDREKSGGELQYEAAVPKIYQYAYNLSTGQTTFTTEPAAGTENTYMQMTPFASWRIRLSKSAHENEGLKFPTASQGDTTRIFIRFFLTIIRKVERKHQ

SEQ ID NO: 819 - protein, 895 aa, Campyloneurum angustifolium
SSARAAGVFSSMAVATLRAAEYRELYKDLNQVSEGLILEMMEFSEVMVIHRMYLRMVELDVGHLEGAEKVKHLYVFADVVEMAPASSTVRLPGSVSVSIVCRVLWLPVPVSNIPLIAFPHLKLRANFASGSGNRQFNVYRRTDGGSEVDEGLALCIHAVDIQLTGVPAFAVNSPAFYLFTDPRNLTMPAEGAITFGDPDRQVPVLMFRMYAEAQRLSGVNTGIIRISPPFSNNLRIATTVHAPPTVTLLTIDTHHPHGPGFWILRGIPDSLLKSDQLMLLMQMSLLIAELAELAHPSSETRAAVLEHVEWLSGVLIDGASSTEGTQMHQEYLELLFRAQYLLKTTSSSRSLVVPQLQYALYSPLINRMAQVAQIYDDAVNQFKLFIAQNRILGSYLLEQNKASAERERDLEVFHAELISQMTIELNSTLLKMDQLSLQMEAQTADMEQAEREMEEGLRRFRNRQVARAIFSVFRAIAAVALTVVTGGAAAPAAMNAARGAVSVAGQAARGLQSVLEILEGLQVVMEVVAIIKELVESLQDLGKLVEAPDMPEMPTDADWAIFVNEVEAVAAEMPEEVSEVVTWKTKCKNVAAVGRELMTTAAYISRLQYDIKEHSMLQEIAKRHANRLANTQAANLSSYTEMVIQMEMRTMRIIISLVKVVYVQNAALMYQYLSQPTQMRQTWPVSMETVWRMLTQREHASVLGLIRLGPSFDFERIYVVRDIPVSLLLTGEDWEFEIPVSDETTFPSSWTRVRIKHLEMKFVHDDGSAAAGHHQPITDTGKVYILLQSSRVFHDRDQAGREPLSYEAALPLDYQYAYHLDTGETTLSNLPTTQFINTYMTMTPFTNWRLRLSASALENQGLDFPTARQQGAVNQDATTQIAITFHVSAIRQISF

SEQ ID NO: 820 - protein, 764 aa, Campyloneurum angustifolium
MADYATIYANANQIYRRGVVMEGSRVMSVQRPYVLLDELDMQKLKNANVVQNLVVVADVAEIQASQLSLPGTNQVLIFCRILQVRSANRILITVAAQATQVQIGAQITQNLEVKWPDGSNFLNSWPVWRGNVLSGDYGSNNFDLQTFLTGADILLGIQATLLIMETILTFQTQLRETVEAASQYAEWLSTLVPHERFATQEIKDQLIPLVYRSQTLAKMPLDGSQTTVVPRLRYDSYRNLVNALAQTAAQYDNDFKDLERFIQTQQLLDARLLEWNKNFIAKERDMESFHSQVLYLKQDEMKSALDKVDRLGKQHQELTDEMNTAKEEMDKGIRRYQNAQIASAFFDVVAAIGAVVATFFTGGATAGVAVERATKAAQSVISLTTALKKVMEVVEKLQEVMELLSAMKTLWDSVQEINNITEAPKMPELPTEADWDIYENNVEEVAASMPTEVTEVQAWKYKCKNVAAVSREITRTAVYVGQLQHEILMNTMQQEIANKQAARLEAMQPQDLSNYQEQVTLIDMRTSRVLLALLNVLVLQNGALRYECLLPPEALTSWPTMDAVRRILITQEGLIVNSQSSLGPPRDYEVTYNLSSIPVDLILDNDDFQFTIPTSNLTFPMSYFKVRIRYLDIQFVNEIGSHRPTTLGGEVFISLQASRTFQDRDKSAHELQYEAGVPNTYQYAYNISTGITTLSTKPAVGTENVYMQMTPFSRWRLRLNRSAHENNGLKFPTATSQGDTTRIFIKFYLTVIRKIETRAGTLST

SEQ ID NO: 821 - protein, 940 aa, Campyloneurum angustifolium
SSARAAGVFSSMAVATLRAAEYRELYKDLNQVSEGLILEMMEFSEVMVIHRMYLRMVELDVGHLEGAEKVKHLYVFADVVEMAPASSTVRLPGSVSVSIVCRVLWLPVHISDIPLIAFPHLKLRVILPRGPVGVVFNQFAVFRRTDGGSEVDEGLALCIHAVDIQLTGVPAFAVNSPAFYLFTDPRNLTMPAEGAITFGDLDRQVPVLMFRMYAEAFAVNSPAFYLFTDPRNLTMPAEGAITFGDLDRQVPVLMFRMYAEAQRLSGVNTGIIRISPPFSNNLRIATTVHAPPTVTLLTIDTHHPHGPGFWILRGIPDSLLKSDQLMLLMQMSLLIAELAELAHPSSETRAAVLEHVEWLSGVLIDGASSTEGTQMHQEYLELLFRAQYLLKTTSSSRSLVVPQLQYALYSPLINRMAQVAQIYDDAVNQFKLFIAQNRILGSYLLEQNKASAERERDLEVFHAELISQMTIELNSTLLKMDQLSLQMEAQTADMEQAEREMEEGLRRFRNRQVARAIFSVFRAIAAVALTVVTGGAAAPAAMNAARGAVSVAGQAARGLQSVLEILEGLQVVMEVVAIIKELVESLQDLGKLVEAPDMPEMPTDADWAIFVNEVEAVAAEMPEEVSEVVTWKTKCKNVAAVGRELMTTAAYISRLQYDIKEHSMLQEIAKRHANRLANTQAANLSSYTEMVIQMEMRTMRIIISLVKVVYVQNAALMYQYLSQPTQMRQTWPVSMETVWRMLTQREHASVLGLIRLGPSFDFERIYVVRDIPVSLLLTGEDWEFEIPVSDETTFPSSWTRVRIKHLEMKFVHDDGSAAAGHHQPITDTGKVYILLQSSRVFHDRDQAGREPLSYEAALPLDYQYAYHLDTGETTLSNLPTTQFINTMTPFTNWRLRLSASALENQGLDFPTARQQGAVNQDATTQIAITFHVSAIRQISF

SEQ ID NO: 822 - protein, 861 aa, Campyloneurum angustifolium
MASTTKAAGDWRELYRDMHQVSDRMRFDQLEASEVMVIHRMHIKLSELDMGNLEGGEKVKQLYVFADVIEYDHGVPGASRIVRLLGSVSVVLICREWHMSCQLVANVDHYEITGRDDGLRIVLPHMTLHVVSTYSIPGRTNRIDPQSMQEFPEPCFQVYAEDLSMSFYAPAGGNSWDPALRFPGGGHFQAINNVDLVTHNAFVSFLTSAGIVTETTRHSTLRIYQWDQAGLHNMYNRIGSQPPGTRFIVPRYTEARTDVWAGGNRVIARVEVRLLPAYIVLGLRNLVPVQLLINPNILLTMQSSMLIGELVEATNPSAATREIVLKHVKWLNNLFLQVIEEKKGKDVEEYIALSFRAQYVIKRVGRIHGLVVPQLQYDAYSNLINRMAQVAESYDQAIRQFRLFIQNTENNKILGGFLLEQNQAFAEKEKDMDVFYSELIAQRQIELGNTLQKLERLSVQMQQAHADMQQAEADMEAGLRRFQNRQVAKAVFSVLGAIAAVALTIVTAGAAAPVAIGAAKNAVTVAGSAARGLIRVLEILEGLQAVMEVVRIVKDLFDALQELGQAVELPDMPDMPLQSDWLIFVNEVEAVAEGMPVEVSEVVAWKTKCKNVAVLGQEMTTSAAYISQLQYDIMMQDMLQQIARRQAERLSVLQLSDVTNFTEMVVQMDMRTTRLLVALIRVVDIQNAALMYQYLSTPTPVSTWPVSMDSVWRMLLQHEQHAIQGLMRLGPSVDIVRTYEVKGIPVSLLLDGDDYEFELSAEDRTPFPLSLSRVRIHHMEMKFVQGAHVHMPTTGTGTIYILLQGSRNFHDRNEGKIVHYEGATSLDYHYAYHLDTSETIITNMPSAEFVRTFMRMTPFTN

SEQ ID NO: 823 - protein, 424 aa, Campyloneurum angustifolium
FATGGATAPAAVSAAEAAVTAAGKGAKGLQAVVDILESLQEVMEVVSAIKELVESLEQIGQLVDAPEMPDLPSNADWEIFVNEVEAVAEQMPTEVTEVVAWKAKCKNVAALGREMSKMAAHIAQMQYQIRVQELLREIAQKHADRLSSIKPADLTNYLEMVSEMDMRTTRLLLELIRVLNIQNAALQYQYLKTPAPLNAWPVAMSTVWGLLMQQETEAIAGLLELGAASDFTREYVVKDIPVRLLQEGQDWEFEIPVSSADFPSTWCRVRISHVAMQFDAGAAATHVPTTKSGEVYMLLQSSRFFDDRAKRANEFISYQTGMGLFYQYAYRLTTGEATVTNIPSDESANTFLRLTPFTRWRLRLSSSADENIGLAFPTATSADATTQIKITFHVSAVRRRNIFIADLTSNTDQFSLNVKKSCVP

SEQ ID NO: 824 - protein, 557 aa, Colysis wrightii
DGEATAVCTRFVVPRLQYHMYGSLINRMVQVAQNYDQEFKQLKLFIAQNEILGSYLLQQNKAFAEREKEMSAFHSQVVSMRRSELTTAIETMNQLSLQMETESEAMNEAQENMVEAIQEYERKLLARALFSVIGAIASVALAVATGGATAPGAVAAARGAVTAAGRLAQGLQKVVDILQGLQAVMEVVVAIRDIVESLKNMGQLVEAPEMPEMPTDADWLIFVNEVEAVAEQVPTEVAEVPVWKAKCKNVAVLGQAMCTTAAYMSELQYQITVEEMLQEIAQRQADRLVGISAADLSSYTEMASQIDMRTTRILLELIKMLYIQNAAIKYEYLYDANEKLNSWPVSMETVWTMLLRQENAALLGLLNLGPSNDFTVTYAVKDIPVKLLVDGYDWNFEIAVEDFSIFPSGWSRVRIRYVELKFDQQGTDSSNIVIHQPSTNTGLVYMLLQGSRFLHDRKREEVMDYEASMGAVFAYAYDLNTGATTLSNIPSQQHANTFMQMTPFNAAWRLRLSASAMENQGLVFPTATSPDNTTQISITFYVTAIRRIDHRQEGDEE

SEQ ID NO: 825 - protein, 946 aa, Coniogramme japonica
MDAATDHDYDYESDMHDEESPDLEHLARKVEMVDVADDDDESGMTIVHGESTEQLARGTRSVDFGAEDYRDLNQVSERIRLDQMEFSEVMVIHRMFIRMVELDLGHLEGAEKVKRLYVFADVVEVAEGVAWGLWRNGPLARLPGSIAIVIVCRVLWVSGVLASLGNNSMMLQLPHMKLRVLEITPSKLEIHRVDTSTEAADYPALCIHASVLECSNIRLANDRDRPPFPVRLFGFRPDLRDPNLVFSSVPRSVVDHHPINEFYVFSVIRDVFPRLPLPESVSVQLDSATRGANWYSLQTGSISQVGSVSLNRFPAEEEELEPAFSLMKTKIPAAILTDPNILLTIQTSLLIAELVEVTHPSAETGAAVAKHAEWVNELLLQAASEASGTPSHEEYLALLFRSQYLIKVRGRTRSLVVPQLQYDVYSNLINRMAQVAESFDQSLRQVKLFILQNKILGSYLLEQNRALAEKERDMDVFHSELISQSKLELENTIQKMEQLSSQMETQREGMDQAKEDMDAGLRSFQNRRVAEAMFAVISATAAIGLAFVTGGATAPAAVTAAGNAVRAAGQAANALQRVVEILEGLQEVMAMVALIKELVDSLQDIGQLVEAPEMPVLPSEAEWFIFENNVEEVAEGMPTEVSEVSSWKTRCKNVAVLGRAMVSTAAYISQLQYDIKVEAMRQEISKRHSERLLAIQPADLSSYTSLLTHMDMRNTRMLLALIRVLHIQNAALMYHSLSLPTHMNAWPVTMDTVWSMLVQHEHAAILGLLRLGPSFDFMRTYVVKDIPVSLLRDGEDCEFNISVQDHSAFPSTWSRVRIHHLEMKFVQEAHVHQPSTHTGKVYILLQGSRIFHDRNEDDVLHYEAAMPLDLHYAYRLDTGETTLSNLPSNDFIRTFIRTTPFTTWRLRLSASAEENEGLDFPTALTADATTQIAITFYVSAIRRISL

SEQ ID NO: 826 - protein, 1004 aa, Coniogramme japonica
MSGTPARLSLPALIISLSLTLTYRQVPDMDAATDHDYDYESDMHDDLVLRRLKLMHQVPDMDAATDHDYDYESDMHDEESPDLEHLARKVEMVDVADDDDESGMTIVHGESTEQLARGTRSVDFGAEDYRDLNQVSERIRLDQMEFSEVMVIHRMHIKLSELDLGHLEGAEKVKHLYVFADVVEVDEGESGELPVRFPGSMSVFILCRIWHVRAFVGLDGRNHHRVLRLPHMTLHLYRSPTLTRLHRLDPTTLQDVAEPALSIYADVVQVSLQNRPATVHSIAPFYFESSDSRVLLSRPNQQRLLQRTSLFWVRLFRNGIPNPGLPAITNEAFSVRIEDRQVLSGRGPFPTTRYSPAFPRGLLTPDIPVIFLTDSHILPALQTSVLIAELVELGRPSQATIDAVASHLRWLNKLLLKVIQETKGSTEFRQDEYLELSFRAQYLIKKMGNIRSLVVPQLQYSVYSPLINRMAQVAESYDQSLTQFRLFIQQNRILGSFLLEQNRAFAQRERDMDAFHSELISERETELENTLDKMLQLHSQMERESAEMERARERMEEALIDFQRRTILRAVFSIFAAVAGLALAFVTAGAAAPAAVAGASAAVSAVSNTVTVAAALQRIVGMLEILETVMEVVRLIKEIIDNMDLVDQLADAPEMPEMPSDHQWLIFMNDVEAVAAEIPPGVSGVSAWKARCRNVAVLGREMITTAGFISQLQYEIKVQTMLQEIAKRQAERLLAIQLPSLTNFTEMVTQMDMRTTRILVTLIKVVEVQNAALMYQYLSEPTLVNAWPVTMDTLWRILVQHEHSAIRGLIRLGPSFDINRNYVVRGIPVDLLMHGEDWQFEIPVLPNDDDDDEMDAIFPSSWSRVRIHHLEMKFVKAPHVHQPTTRTGSIYILLQGSRIFEDRNQGARVHYEAATSLDYHYAYRLDTGETTLSNFPSMEFTQTFMRMTPFTTWRLRLSASARENAGLTFPTAITADSTDQLIDPDATTEIAITFSISAIRHISF

SEQ ID NO: 827 - protein, 774 aa, Coniogramme japonica
SAVPRCSIHAQQVVVSRTAPPPLLSSIGSLIIRVKRDLQRSDKSPFTQYIVRYFSYSGANTVVTAPVSPTRPPSFHWLQIVSTQRRVTVMFNEIKWNKWKADIDFQVALPLLDDLTDIHVIKGIESTLLIVELILTYRSDRMDTVAAALEHLQWINKSLVEVVQLPNSERVLELKALAARAQMLLKLPIDGSHSLKVPQLQYGQYNDVIDQMAVVAEAYNSEFRALDLFIQGNQIIGDYMLTQMKLMSTKEKDVADLESLMVLRKEQELKDAMERLQFSEEQLLKQVEEMTEAQRQMEQGVMEYVNRLTANAFFAVLGASMNIVGSLMSGSIGGVVGGIGGTISEARDIISMMDDAVASRSLLNVANGLIEVERVFEVVNAIHELYKTASSLEDLLVAEEMPIIPASEWDIMENNMEAVAATMPTDVSEALVWKAKCKNVMAVCREICTSAVTLTELQYDLFVHARKQEIAQRHADRLAEFTAADLSEYMEMASQVDTQNMRVLISLLSMLAVQNGALQYNYLMPPEPFTGWPTVESVRSALVRRKHQAVIRKASMGASHELPAHTYVLQSVPVGLLLSGEDYIFTIDPSGSDFESTWSRVRILHLEIKFTGEHQPRGGPREQAYFLLQPSSHFQDRWGNQVFHYEAVVPLIYQYAYNLNTGQTTLPNIPHEEATFLRMTPFTRWRLRLSASASQNQGISFPTATAPDSTTQITITFYVSAHVRPQTFNPLDHAEEPDIPWGEDQQQRSTEPEHEEPERGEEQEQPDIIPQEPV

SEQ ID NO: 828 - protein, 641 aa, Coniogramme japonica
SAVPRCSIHAQQVVVSRTAPPPLLSSIGSLIIRVKRDLQRSDKSPFTQYIVRYFSYSGANTVVTAPVSPTRPPSFHWLQIVSTQRRVTVMFNEIKWKADIDFQVALPLLDDLTDIHVIKGIESTLLIVELILTYRSDRMDTVAAALEHLQWINKSLVEVVQLPNSERVLELKALAARAQMLLKLPIDGSHSLKVPQLQYGQYNDVIDQMAVVAEAYNSEFRALDLFIQGNQIIGDYMLTQMKLMSTKEKDVADLESLMVLRKEQELKDAMERLQFSEEQLLKQVEEMTEAQRQMEQGVMEYVNRLTANAFFAVLGASMNIVGSLMSGSIGGVVGGIGGTISEARDIISMMDDAVASRSLLNVANGLIEVERVFEVVNAIHELYKTASSLEDLLVAEEMPIIPASEWDIMENNMEAVAATMPTDVSEALVWKAKCKNVIAVCRELCSTAVSMSELQYDLFVHASMQEIAQRQAERLEEFRASDLGEVTEMATQVDMQTMRVLLSLLSTLAIQNGALQYNYLMVSEPFTGWPTVENVRSSLVRRQQQAIWDRPPSCRPTRTCWSRYRWACFSLGRITCLLSTQAALISRIPGLASASSTLRSSSLEDTCHAQLATKPISYCKRRPNSRIDGGRRSSITRQLLP

SEQ ID NO: 829 - protein, 882 aa, Davallia fejeensis
MEYSSLYGDVNQVSLRFQKTEFSEDMVVHRMHVRLEELDISVGPFNNETIEGSENVKRLYVLADVVELPSTPRNTRLPATISAIILCRVLYIPDIRFAHPTTCGLDFPFMRLRVVETSQGVGQAFALPSDDDGTGSTGAAASNIGLYILADRFIYRQATSTANFVQPLRLMTYGTSSFSTTVRPDWPEALNISPLTYWLTLSKGPPLTSSDSDLQRSDEIELLARPPPPDRIQVVFRPLAPGNMGGMALLLENSSSAFSFFPAPAPAVSADVLTDPSIILGMQLNMLIAELVLAAHNSPQVIKVVTKHVEWLNKILLQVASPSDDILALLFRVQAFMKMAKRPRFVVPRLQYHMYSSLINRMVQVAQSYDQEFRQLRLFIAQNEILGSYLLEQNKAFAEKEKEMSVFHSQVVSMRRSELNSTIEVMDRLSSQMESESEAMDKAKDNMVEAIQEYERKQLANALFAVLGAIASVALAFATGGATAPAAVAAAGAAVNAAGRLAQGLQKVVEILEGLQAVMEIVAAIRDLVESLENMGQLVAAPEMPEMPTNADWLIFVNEVEAVAEQIPTEVTEVSVWKAKCKNVAVLGQEMCTTAAHISELQYQITVDQADRLVGISIADLSSYTEMASQIDMRTTRMLLELIKMLYIQNAAIRFEYLYAASEQLNSWPVSMQSVWTMLLQQESASLLGLLDLGPSNDFTVTYVVKDIPVKLLVDGYDWHFEIPVDDFASFPAGWSRVRIRYVELTFDQQGTDQSNIVIHQPSTNTGLVYMLLQGSRFLHDRKRGELMHYEASMGLSYAYAYDLNTGATTLTNIPSEAHANTFMQTTPFTAWRLRLSASAMENQGLVFPTATSPDDTTQISITFYVTAIRRIDTRQSGDHVE

SEQ ID NO: 830 - protein, 855 aa, Davallia fejeensis
MERAIPDYSHMYRELNQVSERMKIEEMELSEVMVIHRMFIKLPDLSIAHLEGADKVKRLYVFADVVEFGSVGQTSSLPGSIMVVIMCRVLTWHWADALATPYQLDFPHMRLHAIVRSENGPLLHYHRRNSDSVHDDYPVITVSAHVIQFSGSRPTHFFGIGPLRDPSMIISSVVHQPNIVERPSRGSFCNVGLSSGSSIVTNPGRVQFRIILNWDVDRSYTVTRAPQGFSLLQRDLPDLLLIDPNILLCMQTSMLVAELVEFSHPSSDLHAAVSEHVAWLNTHLLQASTKAQGTSSHDDYLALIFLAQYLLKGMGRARSFVVPQLQYDVYRNLINQMARVAESYDQSLRQLQLFVAQNKILGRYLLEQNRAFAAKERDMEVFHSELIANKELELQNTMFKMEQLSLQMETQIADMDQAREDMDAGLRRFRNRQVANAMFAVFRAIGAIALTVVTAGAAAPAAMAAAKGAVTIAGQAARGLVRVLEILDNLQAAMEVFKIIKDLVESLREVGQLVDAPDMPDMPTEADWSIFVNEIEGVAEEMPEEVSEVSAWKTSCKNVAAVGRELMTTSAYISQLQYDIKVQALLQDIANRQAERLSSIQAADLSSFTEMVTQMDMRTTRILIELIKVLDMQNAALMYQSLTPPAPMNAWPVTMETVWGMLVQHEHAAVFGLMRLGPAFDFKRTFIVKEIPVDLLLHGEDWQFEIPVNELTVFPSTWSQVRIHHLEMKFVGTHDIEGAHQPTSESGEVYILLQGSRVFHDRNKSEPLHYEAAVPLDYHYAYHLETGETTLSNSPSNDFIRTFMRMTPFTTWRLRVSASAKENQGLAFPTTTVGAGDTTQIAVTFYVSAIREISL

SEQ ID NO: 831 - protein, 867 aa, Davallia fejeensis
MELIEKERTNKMVYTSAMVDYERLYREVNQTARAVGINKVRCGEMMAIHRMFVKLDSLTVENLDQYEVVKGLVVIADVVEIEGSSELTLPGSEYVLIFCRILHVKTDKEVVLNLNWKLSHNPPPSPSPRCSFYAQEIVASPNATLLIQVKHNDKWSNDSTFTQCIGRRFSYSSTNSSISSTPPSNVSSLGNPPTSNLILVEFERMNILYNDTNWRAFIRFQVSIPSSYDLLFPNVVEGFESTLLIVEMILSYQTDNRDLVHAAQQHLHWVDKLLLEVVSFGGDAHVQTQNKALLSRAQMLLKMPLDGSQSLVVPQLEYTGYEQVIRDMANMADAYNREFQALNQFIISNQITGQYMLNQNKALAERENDIQALESLIVLRKEQELDQAMRRLELLENNVRRQANEMDAAKDRLDQAIQDASHKRFATAYFALLGATFQIVGSLNVSNVPGIVVGIGGGINDLVNAANEVNDLTQRNMLRDVANKLGNVERVVEVVNAVQDLYKNATSLEDILNAPEMPIILASEWDSMENDVVELAAFMPTEVSIEVSTWTAKCKNVMSTSREICTTAVSISQIQCDLFVHAKQLEIAQRHAERLEEMQAVDLGDFLEMAMQMDMRTTRFLINLFRKLAIQNGALQYHYLLPPRPFTSWPTIDNVRRELVLRAEMSVLAQEQLGPPIRLTRTYAVHSIPVGLLLSGDDWNFLIDPSDDSTFPSNWSQVRIRYLEMEVTGEHKPITQSGEVYLLLQASSMFQDRLRGQIFHYEAAAPLSYAYAYNLATGETTLPNQPHEEGRFLRMTPFTRWRLRLSATAPENQGLSFPTATDLASSTQISITFYVTAIVGIHNLSSTVLSLLDYNEHGEEDHEEAKV

SEQ ID NO: 832 - protein, 340 aa, Didymochlaena truncatula
MPTEADWAIFVNEIEGVAAGMPEEVSEVSAWTTKCKNVAVLGRELTTTAAYISRLQYDITEHAMLQEIAQRHANRLSTIQAADLSSYMEMVMQMEMRTTRIMVSLIKVISIQNAALMYQCLAPPKELVRQWPLRMETIWTMLMQNEHVAILGLIRLGPSFDFKRTYVVRDIPVSLLLAGEDWEFEIPVSDHTTIPSTWSRVRIQHLEMKFVDDDATGAHQPITDTGKVYILLQGSRAFHDRSQLGLLPLLYEAALPLDYHYAYRLHTGETTLSNLPSTNFMDTFMRMTPFTNWRLRLSASAEENQGLDFPTARQQGTINEAATTQIAITFHVSAIRQISF

SEQ ID NO: 833 - protein, 863 aa, Dryopteris erythrosora
MEYSDLYGDVNQVSLRFQNTEFSEVMVVHRMHVRLDELHIPLTALEGSKKVKRLYVLADVVELPSSRPSLLLDLPATISVIILCRVLYAPATLTFLNFSFLQLRLRVVETSEGVAQTFAVPSEDDGDGSNIGVYIHADRLISRQLDTTTNNRLLLVMEVVGAGSTFSSTVRPNWPDTINVSVLGWELLLSRGPALTPSDSDLQRSDEIELLANPPHFPSELHGSVRFESWNPAVNTMHLFLQFQNSSTFSFFPVPAPPHVPADVLTHPSIILGMQMNMLIAELVLAAHNSPPVVNVVTKHVEWLNKILLQVASPTDDILALLFRVQAFMKMAKQPRFVVPRLQYHMYSSLINRMVQVAQNYDQEFRQLRLFIAQNEILGSFLLEQNRAFAEKEKEMSVFYSQVVSMRRSELNSGIETMDRLSLQMGTESEAMDEAKDDMVEAIQEYERKQLANALFAVLGAIASVALAFATGGATAPGALAQGLQKVVEILEGLQAVMEIVAAIRDLVESLENMGQLVAAPEMPEMPTNADWLIFVNEVEAVAEQIPTEVTEVSVWKAKCKNVAVLGQEMCTTAAHISELQYQITVEEMLQEIAQRQADRLVGISIADLSSYTEMASQIDMRTTRMLLELIKMLYIQNAAIKYEHLFAASGQLNSWPVSMQTVWSMLLQQESAALLGLLDLGPSNDFIVPHVVKDIPVKLLVDGNDWHFEIPVEDFAIFPAGWSRVRIRYVELKFEQQGTIHQPSTNTGLVYMLLQGSRFLHDRKREEVMEYEASMGVSYAYAYDLRTGATTLTNIPSEASANTFMQMTPFTAWRLRLSASAMENQGLVFPTATSPDDTTQISITFYVTAIRRIDTRQQGDVE

SEQ ID NO: 834 - protein, 818 aa, Elaphoglossum
RLLKSNRTSTCCAPTGVWELLTCWRQSILSMAKDYAEIYKGTSQLDRSVATPVCSEVMTVARMYLLLDDLDVSLLKQPEVVKTLYVFADVIEMKKRVTLPGLEAFIVCRVFLTFTTTEETRSIWPELQTGVIVCRVFLTFNTTETRSIWPDLETDGPGWVPPDPSDPRPPAEPAPVQVPVYPILTDGTILHPLTAANAVPRSTLENSNMLLAMQATLLISEVILSFMTHATDLFTEATLHVEFLNNLLVKGMEDTTSGSGEEGRHQLRTLLFRVESLLKMQAPGLLVPRLHYNSYRNLINRMADMAMSYDTEFKQLNLYIQQNEVLGTYLLEQNKALAEKEKEMEEVHSELQEYKTTELRDVLATLDRLGGQMSEMSAEMDQAQEDMEKGLIVYQNRQTARAVFSVLNAIAQIGLAFLTGGATAPLAVNAAANAAQSASKLLKVVETLERLLLTVELLVALRDLFDAINNLGSEMTGTPIKPEDMPSAAEWTIFENEIEAVAAEMPVEVSEVLAWKAKCKNMAALGRELVNQTALVSQLQYEINLHSLQREVAQNHADRLLAIQPVDLSNYQEMAIQLEMRTTRILLGLLQVLLLQNGAIHHYYLQAPTPLSSTSVTMTAVRTLLVRQEATAVISLAELGTPSDRNFTYSVKGIPTKVLLDGEDWDFAVPVTDRDVFASDWNRVRILHVELKFVTADSGEVHLPTTDTGEVYMLLRSERFFEDRKNDELLQYEATLPVQYQYAYNLKTGETTEDNRPSEAFANLFMQITPFTRWKLRLSASASENRGLAFPTAVAADATTQIDIRFFVSAIRRIDWKM

SEQ ID NO: 835 - protein, 788 aa, Elaphoglossum
MAKDYAEIYKGTSQLDRSVATPVCSEVMTVARMYLLLDDLDVSLLKQPEVVKTLYVFADVIEMKKRVTLPGLEAFIVCRVFLTFTTTEETRSIWPELQTGVIVCRVFLTFNTTETRSIWPDLETDGPGWVPPDPSDPRPPAEPAPVQVPVYPILTDGTILHPLTAANAVPRSTLENSNMLLAMQATLLISEVILSFMTHATDLFTEATLHVEFLNNLLVKGMEDTTSGSGEEGRHQLRTLLFRVESLLKMQAPGLLVPRLHYNSYRNLINRMADMAMSYDTEFKQLNLYIQQNEVLGTYLLEQNKALAEKEKEMEEVHSELQEYKTTELRDVLATLDRLGGQMSEMSAEMDQAQEDMEKGLIVYQNRQTARAVFSVLNAIAQIGLAFLTGGATAPLAVNAAANAAQSASKLLKVVETLERLLLTVELLVALRDLFDAINNLGSEMTGTPIKPEDMPSAAEWTIFENEIEAVAAEMPVEVSEVLAWKAKCKNMAALGRELVNQTALVSQLQYEINLHSLQREVAQNHADRLLAIQPVDLSNYQEMAIQLEMRTTRILLGLLQVLLLQNGAIHHYYLQAPTPLSSTSVTMTAVRTLLVRQEATAVISLAELGTPSDRNFTYSVKGIPTKVLLDGEDWDFAVPVTDRDVFASDWNRVRILHVELKFVTADSGEVHLPTTDTGEVYMLLRSERFFEDRKNDELLQYEATLPVQYQYAYNLKTGETTEDNRPSEAFANLFMQITPFTRWKLRLSASASENRGLAFPTAVAADATTQIDIRFFVSAIRRIDWKM

SEQ ID NO: 836 - protein, 591 aa, Elaphoglossum
DNRDIAWKHLHSWPEYSCRCSTSMPLAVKTTGTSPGNICILGLSTAAIVPESAVAVITDANILLGMQVTVLIAELVKTAHNSDIVIDAITRHVEWLNHLLVQAHSTAPSEDVVALLYRTQGVLKMPREGLVVPRLQYHMYKNLIDRMVQVARSYDQDFRQLRLFVEQNRILGSYLLEQNRAFAAKEQDMDAFHTQVIALRTTELNNTIETMDLLSIQMEAENEAMEQARADMEAGLVQYQNRQVANALFSVLTAIASIALAFATGGATAPGAVSAAGAAVTAAGQAAAGLRRVVEILEGLQVVMEVVAAIKELVQSLQEIGNLVDAPAMPDLPVMEVVATIKELVQSLQEIGNLVDAPAMPDLPSNADWDIFVNEVEAVAEQMPTEVSEVPAWKAKCKNVAALGREMSTMAAHIAELQFEIQVQEMLRDIAQKQAERLLSIQPADLTNYLEMVSQMDMRTTRMVMELVRVLRIQNAALQYEYLQTPAPLNAWPVTMETVWGLLIQQETAAILGLLQLGPPSDFRREFEVKDIPVSLLLEGQDWEFELPVMNADFPTTWCRVRIDHVEMHFDSAAAHLPTTNTGKVYMLHCQ

SEQ ID NO: 837 - protein, 1344 aa, Polystichum polyblepharum
MGDEGDVKEDEYDYEAAYKEIDDCIRKDECFGRVENCGGLWGQTMVVRSMYLRLDDIDARHVVRPETVETLLVYADVVDVESDWVDLPGTKLVFIHCRLMRLKSRGGSTTVHFKYMMATAREGSPITYLYPHQLIVAGGDQASGLILRVSYRIQVLKKQVELVRTCHLNTFKSITVQTLKTPGFTYNSDESDFEAARTRIDLFEADYSFSEDLCNKIRYLLTTSLSSLQNTLPKICVIPPVACLHLEWLTHDCVLLWLLIREQNLKNLREKKNLVITPELKNSLLITIIKLSRMGEVAFTELVREGLIDDKHKGDLKFIFQTMHNLHRILKIQRTRTIGEVANYDEVFNSVNQIKEVVATRECSEVMVIQQMYLLLDDINVGLLQNPHNVKKLVVFADVIEIRSQNLHIPSSREVIIICRILRTKRANKLTFPYLSYNSYPLSLYVSPFGLLQQDSTSKVCIYTKELIMNDPANLLRVYSTSMELPNLVEVLGDPYVLPLIVDSLQSVENIMTYLKRTTVIATIVQDHLQWLISLLNQMMFAKSGNINITGLWRQWAENLSSHIEDATQHTLSTSEVVDYAEVYKNVNADYTELYKSVNQMRRVFVGGECPEVVIVHRMYLRLDELAASLFKKPYAIKELYVYADVVELGSQNLQIPGSTKIIIICRILRVKGPHKLTFPYLSHDPNSLPLSLFVSMINLMDWTSTLGVCIYAQHLIMNNPFNPTKCSSTSFELSIPVLIQLGNPNVLPLIEGDLQSAELILTNQTSVTATVTATKDHLQWLITILNEAKDITNLSKVSFRDLLNHAQSILRKSNESSILLVPSLRYDKYSDLIKTMANAALDYDNEFKQLDLFNKQIQISGDYLWVQNKKLAEKERDVALFHLSLLEHKKKELNAAKENSSKLKEQLKSLKKELVKAQQDLDAGLKRYRDELKMKAILSVTFLVINLALVFSTFGGNINGYKEVQESIEECKSTKKILVETWKVIKTLQEVALCLGENIGNSTKRKLHDTFDMPKMPSKADWYKFENEIVEMVENLPSKMSEVFAWKAKCKNVAIVSRELITTMAYIRRLEQEIWVEDREVEIATKQAERLEKMKVVGLNNYEDMVFQLDIRTMRILTQLLRVLNLQNGALLYHYLLQPKPIVKRWMNMGEVTSALRSHKELEIEGLEQMGTPTDKESVYKVCNIPVDLLMDGQDWIFTIPTDDFLVFPRSWSHVRIKYVEIRFSPTHHIPSTTSGQVYFLLQASRMFQDRKKEQVLDYEAAVPLEYQFAYDLKSSKTTESNKPTHEYEGSFMRMTPFTQWRLRLSSSAEENQGMSFPTAKEPDSTTEISITFYLTSIREKST

SEQ ID NO: 838 - protein, 1031 aa, Cyrtomium falcatum
MCVQEVIFDTMHNLHRILKIERTRTIGEVENYDEVFNSMNQVREVVSTTECSEVMVVQQMYLLLDDLNVGLLQNPHKVKKLIVFADVIEIGSQNLHIPSSAKVTIICRILRTKRPKKLNFPYLCHNSSPLSLYVSPFGLLQQGSTSKVCIYTKELIMNDPFNPLRVYSTSMELPNLVEVLGDPYVLPLIVDSLQSIYYILTCQKSTAIIATTTQDHLQWLISLLNQMFAKSGNNIIDFWRQWAEYLSKHIEDVTQHTLITSRMVDYAQVYKNVNADYAEVYKSVNQMRRVVAMQGRECPEVVTMHRMYFLLDELNASLFKNPDAIKELYVYADVVELGSQNLQIPGSTQIIIICRILRVKGPHKLTFPYLSHDHDISPLSLFVSTVTLFDWPSTLGVCIYAQHLIMNNPFNPFTFASTCFQLSIPAELLGNSNVLPLIEADLQSAELILTYQTSVTTTITATKDHLQWLITLLTKVKDDADLNEVSFQDLLNHAQSILRKSYGSTTLLVPSLRYDKYSDLIKTMANAASAYDSEFKQLDLFNKQIQIAGDYLWVQNKKLAEKERDVTLFHSSLLEHKKKELNAANENSEKLKKQLESLKTELMEAQQDLDAGLKRYKDDLKMKSILSMVFLVINLALVFTTFGANINGYKEVQESIEGCKEIKKVLVETWKVIKTLHELTLCLFEKIGTSTKRKFHDAFDMSKLPSIADWYKFENEIVAVVENLPSKVSEVFVWKAKYKNVAVVSRELITTMAYIRRLEHEIWVEGREVEIARKQAERLEKMKVVGLKNHEEMALQLDMQTMRILTHLIRVLNLQNGALLYHYLLQPRPIVERWVNMGEVTSALRSHKELELEGLEQMGTPTDKESVYKVGNIPVDLLTTGQDWIFTIPIDDFSAFPQSWSHVRIKYVEIRFSPTHHIPCTTSGQVYFLLQASRMFKDRKKGAVLDYEAAIPLEYQFAYDLKSGKTTESNKPTHEYEGSFMRMTPFTQWRLRLSTSAEENQGLSFPTSKETDSTTEISITFYLTSIREKST

SEQ ID NO: 839 - protein, 1348 aa, Matteuccia struthiopteris
MGDKYVGDKEEEYDYEAAYKEIDDCLRKDESYGRVENYGGLWGETMVVRSMYLRLDDIDARHLVSPERVKTLLVYADVVDVESQWVDLPGTCILIVCRLMRMKARGGSTTLNFKYVMASGSDGHVFTGGLFPPQQLIVAGRGEASGQEQQLVVRYSFRIQVLRKEVDVVRTILWTPYTDITSLRTTRQTLKKPGFTYKSDESDFEEAQTRVELLASEAKGEDLSEVCTLGHDLSKSTCNKVRFLLRTSLSSLQNALPKICVIPPAACLHLEWLTHDCLVLWALIRDQSDRQELRGMQSLIHIATLMRNMGGLGAFTGLIGYKHKPDLKVIFETMHNLHRILKIERTRIIGEVANYDEVFNSMNQIREVVATSEVMVMQRMYLLLDDLNVGILQKTKNVQTLVIFADVIEIGSQNVQIPGSTKVTIICRILRSKRPKMITFPYLCHNSSPLSLYVSPFGLLQQDSTSKVCIYAKELIMNDPFNPLRVYSTSVELSNHVEVLGNPDVLPLIVKSLQSVDYILTYQKSTTIIATTTQDHLQWLISLLNQVMSAKIGNSVIDFWRQWAEDRSKYIEDVAEHTLSTSKVVDYAEVYKTVNADYAEVYRSVNQMRTVVFNTDIECSEVMIVHRMYFLLDELNASLFKSPDVVKELYVYADVVELGSQNLQIPGSTKIIIICRLLRVKGPRTITFPYLSHDHDLSPLSLFVSIVNWPSTLGVCIYAQHLIMNNPFNPTTCSSTSFQLPIPVEILSNPNVLPLIEADLQSAELILTYQTSVTETITATKDHLQWLITILNEAKDHTNINEVSFRDLLNHAQSIFRKSNGSTILLVPSLRYDKYSDLIKSMANAASAYDSEFKQLDLSNKQIQIVGDYLWVQNKKLAEKERDVARFHSSLLEDKNKELNAANENSEKLKEQLESLKIELMKAQQDLDAGLERHKDKLKMKAIQSVVFLLINLALAFTTLGVDIKAYAEVQKSLKKYKDTKKILEDTWSLINMVARSLCVCEKIETSTKIQLHDTFDMSKMPSKAHWYKFENEIVAVVENLPSEVSEVFVWKAKCKNVAVLSRELITTMAYIRQLEHEIWVEKREVEIARKQAKRLEKMKVVGLKNYEEMALQLDMRTMRILTHLLRLLSLQNGALLYHYLLQPRPIVETWMRMCEVTSALRSHKELELEGLQEMGAPTDKESVYKVGNIPVALLMTGQDWIFTIPTDDFKVFPRSWSHVRIKYVEIRFSPEHHTPSTTSGQVYFLLQASRMFQDRKKGQVLDYEAAVPLEYQFAYDLKSGRTTESNKPSHEYEGSFMRMTPFTQWRLRLSTSAEENRGLSFSTAKETDNTTEISITFYLTAIREKNT

SEQ ID NO: 840 - protein, 1082 aa, Thelypteris noveboracensis
MGENVEDNEYHYDYEAAYKEIDDLISTVVKRECSEEIMVVHCMYLRLDDVDAGHLVNPEKVKIMLVYADVVDVESEWLEFSGRFEVYIMCRMLRVKARHGSTLDFKYFTPIGASMKTLQLPAWTMNEQLHIWAQQLMGGENEQELAIRAGFWAYEENTRVQVVGELRVKPYGRECTEDESVTRTCQTLQKPGFTYRPDESDFQEAQSEVNDLLCNRPRWFKECFHLVSPEPIAISWSDELCETIEGALSSLELALSRACIIPSAAFLHLQWLVRHLAQMGSTATMSSIASANINCLESLLSRAKTLLNAITYLQAHTRIIGEVVYAEVYKNMRRAFSTRECSEVMTMQRMYFLLDDLDMGLFKNPHVVKELIVYADIVEVGSNTLWIPGSTRVIIMCRLLSLKRSQPCILNFPHMPHDDASSYLSVYVSPAMLLNQPPATLGVYIYAQELIISNPINPTTCFSTSFQSSIPVEILGDCNVLPLIQGALHTLTYQLSATANVKTTQDHIQWLIIHLAQVENKANLHESSLNDMRDLLLHAQLLLKMSSESKSVIVPSLRYEKYSKLIERMATAASDYNSQFLQVDYFIRQNQISGDYLLQQNKIFMEKERDVEYFHSLLTDCKKVEFDAAMHKMKALKELLTTQEVEMNQAKKDMEAGLKRYQDSKIADAVFSLFGAVFEVGLAASALANAGTTLRRFKDVVEKMKKLKDTLEEIVKMVKMVENICSSFDALMDVYTLDFQKPQQIGKSLMPEMPKMPSKADWEIFENELMQVAESMPSEVSEVPIWKAKCKNVAAVFRELITIVSYMKQLEFDILVEGMEGKIAAKQMERLEHMTLADLKNYEDMAMQLEMRTSRILSRLLKALNVQSGALLYHYLLRPKPITNWMDMDAVTNALLSYEELAVEGLEQLGTPTDYRREYVVADIPVALLMDGQDWTFTIPIDDYLVFPAYWSAVRIKYVEMRFDEGHHLPSTNSGQVYCLLQASRMFQDRKRGEVLDYEAAIPLDYQFAYQLETGCPTVTNKPTHEYMGTFMRMTPFTQWRLRLSASARENHGLTFSTAREANSTTQISITFYLTAIREKSL

SEQ ID NO: 841 - protein, 874 aa, Pteris cretica
MFTQDDDWCVYMYCSPGILDMAGRDHNTDVINYEEIYKAVDEVRRTVVPRSKDAVMIVEGMYVNLNSRIDDGLFTGDSSKPKEVWVVADVVALSNDVKVPTSTERLVILCRILHVDGSYARLFSASQNVILDCDYIQESEAISKSWKVRSTELQIHIYAQCLQAPSSKELMPLCVSIPAHRKYPFFIYVMWGLFGMFDSGRGRMMPALSFPRHENNFLGPLFRSREELEQLERLFVVSLCDEQIPAALLSEAAIVEAMQATLLKAELILTYQTQAHGGATAEMARQHVEWLRSQLKGCISSQQEGQVQLDAGLAALLVRAESLSKMPQRTAYNVVPSLTYKAYRDLINRLATAAKDYDNSFMQMRTLVQSSQMTDSDFETLYKALAQKEKDVDEYHQQLARLKQNELKEVSSSLDVLKCELEKQKQAMDEAEQDANDRLKEYEMKQAAKAVFEVVKAVFAMGAAVFTAGTTVGVALEGVEEAVNASGKMKQALELLEKINKLLKVMAAIQKLIDSLNHLKDVIEAPELPSMPTEADWDIFENEIMAVASQLEKAINVANWEAKCKNVAAVGKEFIKTANRMGQLQYEILVQNLQGEVARRHRERLEEIISKGRDYDKYEEIARHVEMLRSNLHIRLLHILDLQRAAVYYHFLLDQTPFTVWVDVDTVTATLIDNEAVILTNLDSLSKCSDKTITYSVEGIPVSLLESGGAWVFSIAVPGSDQSGHKGFKDLSRVRIEYMTIKFAANSAKPQTHDDDDTDDDTVLFLMQAATDFQDRRKADKKVLQYEAAVPLRYRYAYNFSTEEELVDNRPSTSGGVEDFWMRMTPFTTWRLSLPISDPYNEGLKFDDSSASTTTSIRIVFHVSAIRDESYLFR

SEQ ID NO: 842 - protein, 819 aa, Cyrtomium fortunei
KLWKSRKVLGGGGGMVVRSMYLRLDDIDARHLVSPERVENLLVFADVVDVESDWVELPGTKTVLMVCRLMRLKARGGGSTTLDCRLRLATDQVDAGGGVYPPQQLIVAGEASGLLVRCSYRIQVLEKEVDVVRTCHLSPYTDVMAGLIVTMQTLKTPGFTYNCDESDFEAAQTRVVVLEERAMPERTCNSVCFLLRTSLSSLQNALPKICVIPHPAARLHLEWVTHSCLPLWLLIRGQYLHEKKDLVITNELQAQILTYIVKLIRMGEVAFTKLVQEGLIGYKLKGDLKVIFETMHNLHRILKIERTRTIGEVANYDEVFNSMNQVREVVSTTECSELMVVQQMYLLLDDLNVRLLQNPHKVKKLVVFADVIEIDSQNLQIPSSAKVTIICRILRTKRPKKLNFPYLYHNSSPLSLYVSPFGLLQQGSISKVCIYTKELIMNDPFNPLGVYSTSVELPNLVEVLYVLPLIIDSLQSIYYILTCQKSTAIISTTTQDHLQWLISLLNQMFAKSGNNIIDFWRQWAEDLSNHIEDVTQHTLSTSEVVDYAQVYKNVNAHYAEVYKSVNQMRRIVATQGRECLEVVTMHRMYFLLDELNASLFKNPDAIKELYVYADVVELGSQNLQIPGSTKIIIICRILRVKGPHKLTFPYLSHDRDISPLSLFVSTVRLFDWPSTLGVCIYAQHLIMNNPFNPTTCASTCFQLSIPVELLGNPNVLPLIEADLQSAELILTYQTSVTTTITATKDHLQWLITLLTEVKDDANLNEVSFRDLLNHAQSILRKSNGSTTLLVPSLRYDKYSDLIKTMANAASAYDSEFKQL

SEQ ID NO: 843 - protein, 616 aa, Colysis wrightii
RAYSANRVRPKFPLHHLSHVFLYLVYVNLNLRIVEGLFLNRGGSKPRKVWVVADMVALSNDVMVPTSTERLVILCCILHVDGSFARLFSNSQAVAVLNQNHGEVSFYNSCKVLSTELQIHIYAQCLQAPSSKELMLLCISIPVHRGSPFALNVTWGHFGMFDSHRSRMMPVLSFQYNDAKNFVGPLFRSREELEELERLFVVLLCDEQIPAALLGKAAIVEAMQATLLKAELILTYQTQAHGGATAKMARQHVKWLRSQLKGCISSQQEGQVLDAGLAALLVRAESLSKMSEQIAYNVIPSLTVIPSLTYKAYRNLINKMATTAKDYDNSFMQMWTLVQSSQMTDSDFETLYKALTQKETDVDEYHQQLARLKQKELKEVSSRLDVLKRELNKQKQAMDEAEQDANDRLKEYEMKQAAKVVFGVLMAVFAIGAAVFTAGATVGVAMKSVEEAVNASGKLKQAFELLKNTNMLLKVMAAIQKLMDSLDHLKDVIEAPVLQSMPTEADWDIFENEIMAMASQLEKAINVANWKAKCKNVAVVGKEIIRTADCMGQLQYEVLVQDLQGGVARRHKKRLEEIVSKGRDYGKYEEIARHFEMLRSNLHIRLLHILDLQRLY

SEQ ID NO: 844 - protein, 580 aa, Blechnum occidentale
LNWVSCLSSTSVDGEVSKDLGALLFRVQALLKLPLSYEVVPSLEYTTYQMLIDNLARAAEAYNNEFNRVDLFIRQNQILGSYLVEENKALAEKEKDMEELHNTLVKRKQDELEATIKKVDLLQIQMAEQKRAMDKAKEDMDSGLKEYEEKEIAKAFFAVLSAIGGCVLAFATGGAAGGGAAEGVEKAAEAVKEAEKAVSLLVKLVDTFKKLMDVLKKVQKVVEAVLAIKDLIEKIVDITKMVNAPPMPDLPSNADWEIFVNEVESVAENMPKEVSEVATWKCKCKNLAAVCREITTTVVYMQQLEYDLLVESLQAKVAAKHAERLQEIKPADVKNYLEMASQMNMRTTRILLNLLKVFKLQRGALLYHYLLPPNPFTGRVTIDTVRNALVQNAADAIMAMQQLGPSNNFEREYVVCDIPVDLLMQGQDWTFTIPIDDYVNTFPSAWCRVRIQHVEIKFSSGHHQPSTNDGEVYFLLQASRTFQDRGHSGDLLNYEAGVPLYYQYAYSLKSGKTTLSNKPTQEDEGLYMRLTPFTQWRLRLSASAYENQGLSFLTAKATDPSENTQISITFHLTAIRTVSF

SEQ ID NO: 845 - protein, 902 aa, Lygodium flexuosum
MSTAEAELMTSTAYESISNGAAWSPTNHTDDVAADDDEEWQDDMISMSDYEKLAYGDHYADYEAIYSGVNQLARAVGIRNRVECGEVLAIHQMFVRLDTLSVGNLLRPERVQRLIVFADVVEIKGATLTLPGSALVLIACRLLRVENRDVELNLSWNLAASSTGTPAPRCSIRAQEVITTSSTMPVLGCTLLIQVMHALTWNNNSTFTQYFGHRFSYSSENSSSTAPPVNQFMSSPGVPPTSNLILVNSKTVNILINNMRWKGYIDFQIGLPPWDDLVEPRLIDGIESTLLIAEMILSFQTNARDTVRAAKEHVEWINKALLQVVDAPNSEARFRLKILLARVQMLLKLSMDGSPPGLVVPVLEYSRYERVIRELVRVAELYNSEFNQLNLFIQQNQILGDYVLQQSKVLAEREKDVQALESSIVARKQQELNSAIRRVELLEAQLQTLATEMDEARENMDKGLQAFRNRQIAMAFFTVLGAALQLGGSLRLSSIPEIVVGIGASISEAINVAQQVEDAVASNNLVDVATKLVDVEKVIEVVNAIKQLYENDAFLEDILDAPEIPVIPSSDWDIMENNIEEVAAGMPTEVSEVVTWKTKGKNVIAVCREICATAISISELHYELFVHGKQRDIAQRHIERLEQMQTANLGEYIEIATQVDMQTMRLLIILLGNLAIQNGALHYHYLLPPEPLISWPSIDSVRRHLIQQEEKALLAEEGMGVPVRLSRAYVVEDVPVKLLLDGGDWIFTIDPSETLGFPDTWYRVRIRYIEMKFTGENIPQNPNTGKVYLLLQASSMFQDRYEREVFHYEAATPHNYQFAYELDSGEVTLPNEPAEAGRHFLMTPFTRWRLRLSASAYQNQGVFFPGTHDDGASTNISITFHVTSIVGIQHRIAEEEETLVIN

SEQ ID NO: 846 - protein, 708 aa, Lygodium flexuosum
MAAKPVLEINVADDMDYAELYRDVNQVTRPVATRQCSEVMAVHRMYFRLDDLHVDNLQNSQVVKQLYVFADVVEVEGDSVELPGSGQVSIFCRVLKLKRSEAAIRLSMLEAVRCTGRQRRTALGQDVEYYWVTPQNRLDGAGPVVTVLAAQLVAPPGAAQLRLTYPLIVDARVYDSDGYHPDFFTSNGTMEWRISTPTNGSSNTNPERTCGARTVIRPGIQWRAFEEEWYPSFRVLVAEAIPPEMLDNSNVLLGMESTTLISELVMAYQREAKDTMAATLRHVEWLNHQLLAVNQDTHSNFQFHHKQQIQSLHFRVQSLLKLPNATDDAKTLIVPPLQYNVYSNLISLMTQAAQSYDNDFKNLNLFMQQNEILGSFLLEQNKAFAAKERDMESHHSQLVNLQEEQLVTAKTRVDRLHDQLERESQAMDEARADMEAGIREYRNRLVAQAFFAVIQAVAAVCLAAFTGGATAAGAVGSAKQLSEAAQALQSVVELLERIEQIVEMVNAVTDFLSALESLNQMIELPEMPELPSTADWDIFENEIVAVAEGMPTEISEVPVWKAKSLNVAALGREIITTVAYIQQLQYDLGVNGMLQRIAQQQAERLESLQIQDLDNYLEMATELDMRTSRMLMSLLKVLTLQTAALSYHYLLPPRPLIGWVRMDSVWNALVRNAYDAVIALSSLGPSTDFVRTYDVKEIVTFEWTRLDL

SEQ ID NO: 847 - protein, 896 aa, Lygodium flexuosum
MAGSAGAADAWREVYRDLNQVSDRIRLDQLEFSEVMVIHRMHIKMSELDLGHLEGAEKVERLYVFADVVELDVVPHESSSDGDVVVRLPGSKFVTFVCRVWHINYALVQISSFARITRSVVLELRHMRWHFNAITGRMHLLDPQTLQDGMDLCFCVHAEVVQIAYYPDVTFPESNDSPSFLRFLRLEIVPDQLRVTTQTDGPVWALRGSLDYFMTPDNDGLLNEVSSQPAGTSFVLNILPDNLDVQLYANLRPNSGTTLTRDPNSIVPAFSVYKEKAGELLSDPNILPAMQTSMLIGELVEVGQPPSVTTEVVRKHVEWLNNLLLQVIEAKRGEHVEDYVELSFRAQYVIKKVGRIQRLVVPQLQYSAYSNLINRLAQVAESYDQALRQFRLFIQQNKILGGFLLEQNRAFAEKEQDMDIFYSELIAQRQIELDSILQKMKHLGAQMETQTADMEQAQADMEAGGSVGIREFQNRQVARGLFAVLGAIAAIGLTLLTGGAAAPLAVSAARSAVSLAGAVAQGLQRVLDILEGLQVVMEVVELINGLISSLQELGQPVELPEMAEMPTEADWLIFVNEVEGVAEQMPTEVSEVVAWKTKCKNVAVLGREMTTLAAYISQLQYDINMQHMLQRIARKQADRLSAIELPDLRNYGELVTQMDMRTTRLLVALIKVVNIQNAALMYQYLSEPTPVYAWPVNMDSVWRMLVQHEQFAIQGLMRLGPAFDIVRTYEVKGIPVSLLLDGDDYEFEIPAQDHVTFPLSLSRVRIHHLEMKFVQGEGDQLHMPVTDTGSVYILLQGSRNFHDRSEGSILHYEAATSLDYHFAYRLDTGETTVTNLPSAEFLTTFMRMTPFTNWRLRVSASAEENKGLAFPTATSADATTHIAITFFISAIRQIAL

SEQ ID NO: 848 - protein, 817 aa, Marsilea mutica
MDYTKLYNDVNQVSIRLELMDFSETMVVHRMLVRLDELDVSSGTGLISGAEKVKNLYIFADVLELPSASKKVRLPGSDKIIIVCRTFVANAQSSSTDLPLTSGVKFNMETGSKSTSVGGAYASSTKSSSSTAKGLQLKIQNGSYKSTMRQGSLSASEASTLELDISTTSGIINVITLNTSPSGSICFVGMTANATPPSTVVDVITDANVLLGMEVSLQIAELVKTANNSEDLLTAVTAHVQWLNDLLLQAVDALGVDKAGEAATLLCRAQGFLKTKRPNLTVPRLQYSMYKNLIDRMVQAAQDYNQSFVQFKLYVAQQKALGSFLLEQNKAFAAKEKDMESFYTQVISLRTTELKNAISRMETLSDQMDEESEAMDKAREDMEAGLIEYQNKQLARAFFAVIGAIASIGLAFATGGATAPGAVSSAQTAVTAAGKAAEGLQKVVDILKGLEEVMALVAAIKELVESISNIGELVNAPEMPDMPTDADWDIFVNEVELVAEQMPTEVSEVPAWKAKSKNVAALGREMTTTATYISQLQFQITVDQMQLEVAQKQYDRLSSITIGDLTSYLEMVSQMDMRTTRILVQLINVLYIQNAALYYEYLLVPEQLSAWPVTMQTIWTLLIQQEVKAITGLTELGPSSDFTRSFIVQDIPLSLLKSGNDWEFEFPVSGADVFPIAWSRVRIDYIEVKFPSTARHAPSTSTGEVYILLQGSRFLDDRAKKDNEYISYEATTGVPYQYAYRLSNGETTVSNIPSQEYRNTFMRMTPFTSWRLRLSISAPENQGLDFPTSTSIGDKTQVEITFYVTAIRRISTRDQPI

SEQ ID NO: 849 - protein, 767 aa, Marsilea mutica
EGEESVHLCRCGGVTISVKESVRLPGSDKIIIVCRTFVANAQSSTTDLPLTSGINFKMETGFKFTGVGGMYITSTKSSSSTTKGLQVRIQNGSYTSTMRQGSLSASEASTLALDISSTSGIINVITLDTSLIGSICFVGMTNSAIAPSTAVDVITDANILLGMKVSLQIAELVKTAHNSEDLLAAVTTHIRWMNSLLVHAVEELGVANAGEAVALLCRTQGFLKTKRPNLIVPRLQYNMYKNLIDRMVQAAQDYNRSFLQFRLHVQQQKALGSFLLEQNKAFAAKEKDMESFYTQVISLRSTELGNAINRMENLSEQMADESAAMDKAREDMEAGLIQYQNRQVARAFFAVIGAIVSTCMAFATGGATAPGALASAQNAVTAAGDAAGGLQRVVDILQQLEEVMALVAAIKDLVDSIRNVGELVNAPEMPEMPSDADWDIFVNEVELVAEQMPTEVSEVPAWKAKSKNVAALGREMTTTATYISQLQFQITVDQMQLEVAQKQYDRLSSITIGDLTSYLEMVSQMDMRTTRILVQLINVLYIQNAALYYEYLLVPEQLSAWPVTMQTIWTLLIQQEVKAITGLTELGPSSDFTRSFIVQDIPLSLLKSGNDWEFEFPVSGADVFPIAWSRVRIDYIEVKFPSTARHAPSTSTGEVYILLQGSRFLDDRAKKDNEYISYEATTGVPYQYAYRLSNGETTVSNIPSQEYRNTFMRMTPFTSWRLRLSSSAPENEGLNFPTSTSTSDTTEVEITFYVTAIRRISTRDASI

SEQ ID NO: 850 - protein, 409 aa, Marsilea mutica
SKRGHGSRPDRVSKQAIGKSILCRDRRHSLYWSSIRHWWCNSTWRMALVAAIKELVESISNIGELVNAPEMPEMPTDADWDIFVNEVELVAEQMPTEVSEVPAWKAKSKNVAALGREMTTTATYISQLQFQITVDQMQLEVAQKQYDRLSSITIGDLTSYLEMVSQMDMRTTRILVQLINVLYIQNAALYYEYLLVPEQLSAWPVTMQTIWTLLIQQEVKAITGLTELGPSSDFTRSFIVQDIPLSLLKSGNDWEFEFPVSGADVFPIAWSRVRIDYIEVKFPSTARHAPSTSTGEVYILLQGSRFLDDRAKKDNEYISYEATTGVPYQYAYRLSNGETTVSNIPSQEYRNTFMRMTPFTSWRLRLSSSAPENEGLNFPTSTSTSDTTEVEITFYVTAIRRISTRDASI

SEQ ID NO: 851 - protein, 522 aa, Huperzia carinata
ILVFPFCVCMCARGSLLLHSGKILGSYLLQQNKAFAAREKDMEAFHGLVVARKQEELRAAQEMMNSLNAQLTHQTEAMDQAKKDMDEGLKRYRDEQVARAFFAVLKGVLEIGAAIFTGGATAGLAVKGAINAVNAVSNLAGMLDMVIKIMEGMEQVMEVLNAIDDLVTALSEINQMVEAPQMPSMPSTAEWDIFENEIEEVAESMPTEVTEARTWRTKCKNVAALCRAICTTGSYIGQVQYDLFVHSNQELIARRQAERLEAIQPANLTNYLEMATQMDMRTSRMLLGLLKVLTLQNGALKFHFLLPPKPFTGWVTMDMVRNALVQHEADALAARERLGPSTDFTWTYVVSDIPISLLLDGDDWIFTIDPADGSAFPLSWSRVRIRYLEMKFTGGEEFHKPTTNSGEVYILLQASRIFQDRLLGEVLHYEAAVPLRYQYAYALESGETTVSNRPSQQHDGEYMQMTPFCQWRLRLSASALENQGLAFPTAAADLNSSTTQVSITFWLTAIRRIDTRLLEVSQ

SEQ ID NO: 852 - protein, 824 aa, Microsorum musifolium
MFVRMDDLDVSSGCRSAMADLDYSKLYQDLNQISVRLEKTEFSEVMVVHRMFVRMDDLDVSSGSGLLSGAEKVKRLYVFADVVELPSKQVRLAGTDMIVVFCRIFVPEGRHYAELFLPSMNMSMVGADGEGSIRGVILSPTVLTTLSNALQFRLECGSMTSVMRLNDVSAGATLTCNVQGASACVPLKVKTTGTSPGNICVLGLSTAAVVPESVVAVITDANILLGMQVTVLIAELVKIAHNSDGVIAAVTRHVEWLNHLLVQAQAAAPSEDVVALLYRTQAFIKLRKEGLIVPRLQYHMYKDLIDRMVQVAQSYDQDFKQMKLYVEQNKILGSYLLEQNKAFAEKEKDMDASHSQVIALRTSELQSTIERMDDLSKQMEVQSKAMEKAKADMDAGLIVYQNKQVADAVFAVMEAIASIGLAFATGGATAPGAVASAGAAVSAAGKAGEGLKKVVEILEGLQAIMEVIAAIKGLVQSLQKIGQLVNAPEMPDLPSEAEWEMFVKEVEAVAAQMPTEVTQVPAWTAKCKNVAALGREMSTTAAHIAELQYEIQVQGMLQQIAKKQADRLSSIKPADLTNYFEMVSEMDMRTTRMLLELIQVLNIQNGALRYEYLQPAAPLNAWPVTMQTVWGLLVQQEAAAINGLLQLGAPSDFTREYVVGDIPVKLLLGGGDWEFELPVTDADFPLTWCRVRIQHVDMQFDAVAEHLPTTSTGEVYMLLQSSRFFEDRAQHEDEFISYEAGTGLQYQYAYRLATGEATVTNVPSEAYVNTFMLLAPFTRWRLRLSSSAPENKGLAFPTATSADATTRIKITFHVSAIRRISLAR

SEQ ID NO: 853 - protein, 902 aa, Microsorum punctatum
MANDTSSGIVDWRELYRDMNQASDRIRFNQLEFSEVMVIYRMHIKMSELDMGHLEGSEKVKRLYVFADVVEYDANGIARLPGSISVVFLCREWHVSYHLVARMDRNPPRYQLDLAQGVIISLPHMAWHLDVRRQSMHRLDPETLQEFLEPSFCVYADDISVAYYSLNGASWDPALQFPDTAELAKCALLIYSNSNPTPNHVLLTSNRFNGTRWAFRFEFSMYYIDNEDVAKDIALQPPGTRVIFKREGLHLVVLAMDSANRIISFDPERGDLDAYMPAFSLLRQDAKFPIELLTDPNILSAMQTSMLIGELVEVGNPSTAVTEVVHKHVKWLSKLLHQVIEEKNGKDVEDYIGLSFRAQYVIKKVGRIRGLVVPQLQYDVYSNLINRMAQVAESYDQALRQFRLFIQNNKILGGFLLEQNRAFAEKEKDMDVFYSELITQRQIELDNTLQKLKRLSLQMETQQADMEQAQADMEAGLRRFQNRQAARALFAVLGAIAAVGLAFLTGGATAPAALGAARTAVTVAGSVVSGLQRVLEVLEGLQAVMEIVVIIKDLFSALQDLTQAVDLPDMPEMPLQSDWLIFVNEVEAVAQGMPTEVSEVVAWKTKCKNVAVLGQEMTTTAAYISQLQYDIMMQDMLQQIARRQADRLSAIQLPDLTNFTEMVIQMDMRTTRILVALIKVMYIQNAALMYQYLSEPTPVSAWPVNMDTVWRMLVQHEQLAIQGLLRLGPAFDIVRTFVVKSIPVRLLLDGDDYQFEIPVEDPLTFPLSLSRVRIHHLEMKIVQGAHVHTPITATGKIYILLQGSRNFHDRNEGKIMHYEAATALDYQYAYQLDTGETTVTNLPSAEFLRTFTRMTPFTNWRLRLSASADENEGLAFPTATSADATTEIAITFHISAIRRISD

SEQ ID NO: 854 - protein, 907 aa, Microsorum punctatum
MASITSGAGADWRELYSEMNQVSERLRLDQLEFSEVMIIHRMHIKLSELDLGHLEGADKVKHLYVFADVVELDNAADPSTPVDVRLPGSISVVFLCRVWHVSRRLTVGVNSPQYWLPTFDGRPVRIQLPHVKWHMNTLTRSMHRIDPETLQDLSGPLLCVYADLLRTSLHPPVGHSNWDAALAFPSMTVLREVEVLPCFDHSTPRQGLLTLTSNAAPQWVNQLRAAFIFTDQDAMTEILSLPADASVILNKNRPSIILTAGQSGGYTDRNVSAPAFSVLREGAETPIDSLTDPNFLPAMQTSMLIAELVEVGRPSAAIIEVMHKHVEWLNNLLLQVIEAKKGKDDVEDYIQLSYRSQYILKNVGRIDRFVVPQLQYDTYSPLINRMAQVAESYDQALRQFRLFIQQTQQNKILGAFLLDQNRAFADKEKDMDIFYSELIAQRQIELHNTLQKMEQLSLQMETQSADMEQAQADMEAGLRRFQNERVARAVFGVLGAIAAVALAFVTGGATAGAAIGAAKTAVTLAGAAARGLQQVLEILDGLQAVMEVVGMIKELFESLQELGQAVDLPEMPEMPLESDWHIFVNEVEAVAEQMPTEVSEVVAWKTKCKNVAVLGREMITLATYISQLQYDIQMQDMLQQIARKQADRLSAIQLSIPNTGYTEMLMQMDMRTTRLLVALIRAVHIQNAALMYQYLSEPIPVSAWPVNMDAVWRILVQHEQSAIQGLLRLGPAFDIERVFVVEDIPVSLLLEGDDYEFDIPVEDNITFPLSLSRVRIHHLEMKFVASGGQKQVHMPVTDSGSVYILLQSSRNFHDRNERAVVHYEAATSLDYHYAYNLETGQIKVTNQPSAEFRKTFMRSTPFTNWRLRLSASAEENKGLAFPTATSADATTQIVVTFHISAVRQVAF

SEQ ID NO: 855 - protein, 922 aa, Microsorum punctatum
MHPTGHDGISNIPLEQCHDDYAEERQMKPRFETNGLELDYEKIYAGSNSIAREVGLDKVNCGEVMAIHQMFFRLDTLSQELLRRPELVKRLIVVADVVEIEGSNATLSLPGSSLVLIFCRILILKSRNLVLDLDNWNLRAASTTPLHRCSIRAQRVVIASGFSLYSSLLIQVKHKFEWSDGTHLDQYFGRPFYFTAIGINSSATITTTATSAMRSINTWPGTAPVSNFIRVNSEKFNVLVNAVPWKGVIDCQAALPSLDDLLHPDVISGFQSTLLIVETILNFQTDNPAIISLARQHAEWILDSLLQVVPLPDSTLGVPEAKTLLARAQILMKLPTDGSQHLRVPLLAYGEYQEDIERLLRNAEAYDQEYRELTRFVQLVEIIGSEFLQLSRSLAQRERDIEAFESLAVIRKQSELDQAIRRMNSLMPEIERRSFEMADAKARMEEGCLFYRMFTSYITVKCKTSKLTCLIAAGLEDYNRRQLTRAIFGILGALLQLCASLKFGGGADIAGGIATTVPAAIDLIHAVQDTSASTKLLAISQTLMDLEKIVDVVNAVNTLAESATELEDIVHAPELPLIPPYTWDILENDIEEFAALMPLEVSEVVTWKAKCRNLVAVCREICIAASFACEVQYELFVHARQQEMARRQAERLEGMQTAALSSYIELATQADMRTARLLLSLLNVLAGHQGALHYHYLMELEVFTSSWPTVDSVRTHLLQLNQRARARENALFGDGVLTVDLQHDYVLDAIPVSLLLSGEDWNFTINPERNASSFPTPWDYVRIRYVEMRFTGEHLPVSETGEIYLLLRSSANFQDRLEEQVLEYEAAVPLVYQYAYNLSTGATTLPNQPSESGKFFRMTPFTRWRLRLSASAYQNQGVSFPTLPGDPNSDSPVQITITFFVTALPQIQSRSLDMSDGDPTEE

SEQ ID NO: 856 - protein, 888 aa, Nephrolepis exaltata
MEYSDLYADVNQVSLRFQETEFSEVMVVHRMYLRLQDLDMKTQPFPSMLWGSEKVQRLYVVADVVELPSTPTTMLFPATVSVVILCRVLYVHDLSLHIGTCGIQFTLLRLRLVETKEGLVKIFPIPASASSKDTDIGLYIHTDRVIYRQNTSSDDVHILQPLQMRVWGIWADSTFSTEVRANWPTTLAVHVLILWLTASKGQRIPATESDLQRSDEFELLCPPTPDKLKVSFASPVPPGIPSPIEVDFENTFSFFRVPPADAIPTEVLTNPYIILGLQMNMLIAELVLAAHNSPRVINVVTKHVQWLNKILKPKLGLANDDILALVFRVQSFLKTANQPRSIVPRLQYHMYSKLIDHMVQVAQAYDQEFKQLKLFIVQNQILGSYLLEQNKAFASREKDMSAFHSQVVSLRRTELSTAIGRMDQLSVQMERENKEMDQARVDMMQAIKDYQKKQVANALFAVLGAIASVALAFATGGATAPGAVAAAGAAVTAAGKLAEGLQKVVEILQALEVVMEIVGAIRDLVESLQNLGKLIDAPEMPDMPSDADWRIFVNEVEAVAEQMPAEVVGSVAVWKAKCKNVAVLGQEMCTTAAHIGELTYQIKVEEMLQEIAQRQADRLEEITPADLSSYTEMLSQIDMRTTRLLLQLIRVLYIQNAAIKYEYLYDASSQLNSWPVSMDTVWSMLLQQENSALMGLLDLGPSTDFTRSVVVKDIPVGLLVDGNDWQFVISVEDSAAFPIGYSRVRIRYVELKFEQGSNEDGTVIHQPHTDSGLIYMLLQSSRFFRDRKRREILDYEASMGLAYAFAYNLTTGVPTVTNIPSQQYAHTFTSMTPFNNWRLRLSASAEENQGLTFPTATNSPDARTQIALTFHITAIRDIDTLAAADDDE

SEQ ID NO: 857 - protein, 900 aa, Nephrolepis exaltata
MATVVKAGRGTVTRDYEELFRDLNQISDRIRLDQMELSEVMVVHRMFIRLQELDLGHVEGAEKVKHLYVFADVVEVEEGGNSAVWAPLARLPGSITVVILCRVVSVAGILLMGSSTFNNAMRIQLPHMKLRAVEITTQSPAKLQMHRRDAALADEQYPALCIHASVIQCSNIRSAVPVNLQRFPVSLQFFSYMPDRESNEVVLSSASRQLVDEPVDSFNVHTLAPEYIKGVPIPEVATIDSASLSENSYSVQISRLNLSLSNSIAAEGELEPAFSLLKPKVPFTVLIDPNILLAMQTSVLIVELVELAHPSADTRDAVTKHKEWINQLLLQATSANGEGTNASLDEHRALLFRVQYLMKRIPGREDSLVIPRLQYDVYSSLINRMAQVAESYDQSLRQLKLFISQNRILGSYLLQQNQAFAEKERDMDVFHSELLSQRKLELEDTIHRMGLLGSQMETQQREMEQARADMEAGLREFRERQLARAMFSVLGAVAAVGLAFLTGGATAPAAVRAAHTAVSVTSSIRRMFETVMQVLDGIQAVMEWVVLIKELVSNIQDLNKLVEAPEMSEPVPTQADWDIFVNEIEAVAEQMPTEVSEVSTWKAKCKNVAALGREMTTMAVYISELQYEIKVQSMLQEIARSQADRLSNIQAANLRSYTEMVTQMDMRTTRMLVSLLEVLRIQNAALMYQFLSPPTLMDAWPVTMETVWRILVQHEHTAILGLMRLGPSFDFMRTYVVEGIPVDLLLDGEDWEFEIPVEDYITFPPTWSRVRIHHLEITFVQGADVHQPMTETGKVYILLQGSRIFHDRNQDDAILYEAATPLDYHYAYRLDTRETTLSNLPSHDFTRTFMRMTPFTNWRLRLSASAEENKGLRFPTATSADSTTQIAISFHVSAIRRVSL

SEQ ID NO: 858 - protein, 888 aa, Nephrolepis falcata
MEYSDLYADVNQVSLRFQQTEFSEVMVVHRMYVRLLDLDMTTEPHLQMLAGSEKVRRLYVVADVVELPATATNMRLPATASVVILCRVLYVQDVNSPYLACGLHFPLMPLRVVEDTQQGRVRVFPVVGGGSASVDMNNQIGLYIHADRVVYRQGTSTADPLQPLQLRVIGNGSTFSTEVRPDWPKTLEVSSLLMWLTLSKGQPIPAAESDLQRHDEVELLSPPSPDRLSVVFAYLAPGNLFSIAVDVEYIGAGFCYFRIPPADPVPTEVLTDPYVIIGLQMNMLIAELVLAAHNSPPVISVVTKHVEWLNKILQPKLSLPNDDILALLFRVQAFLKMAKQPRSVVPRLQYHMYSPLINRMVQVAQVYDQEFKQLKLFIVQNQILGSYLLEQNKAFASRETEMSSFHSQVVSLRRTELNNAIDRIDQLSVQMENENEAMDQAKEDMMQAIAEYEKKQLANALFAVLGAIASVALAFATAGATAPGAVAAAGAAVSAAGRLAEGLKKVVEILEGLAAVMEIVAAIRDLVESLQNLGQLVETPEMPDMPSNADWLIFVNEVEAVAEQMPAEVVGSVAVWKAKCRNVAVLGQEMCTTAAHIGELTYQIKVEEMLQEIAQRQANRLESLTPANLSSYTEMLSEIDMRTTRLLLQLIRLLHIQNAAIKYEYLYAAGEQLNSWPVSMDTVWSMLLQQENSALVGLLDLGPSNDFTRSFVIQGIPIGLLVDGNDWQFSIPVEDSPTFPIGYSRVRIRYVELRFDQGTSDEGRMIHQPSTSSGLTYMLLQSSPVFRDRRRREVLEYEASMGLAYAFAYNLTTGVPTLTNVPSPEFANTFMRMTPFNSNWRLRLSSSAMENQGLMFPTASSADDTTQITITFFISAIRGIDTRAAVEI

SEQ ID NO: 859 - protein, 872 aa, Nephrolepis falcata
MEYSDLYHDVNMLSLPLHRTELSEVMVVHRMHVKLRDLNLETAVSDKVHRLYVVADVVEVTLDTVSLPCKVSVVILCRVLHVEQSSVLFSSLLLPNMNVRVVLSNNRMQVYPMATDGSADDVALYIHADRVIRRQGAWTLVRVMHMSITGPESTFSVPHLPDPALFNRVMVNVQMDAGPSIPASESDLQRSDETELVSRVSNGVTVSASIAGSAWTMPADNPSATFTVFPNPPAQPVARGVLTNPYVIIGLQMNMLTAELVQAAHNAPLLIRAVTRHVEWLNKILVEALQVVSGNEDLLALLFRTETYLKMATESRSVVPRLQYHMYSDLIHRMVQVAQAYDDEFQRLRLFIAQNEILGSYLLEQNKALASREREMSAFHSQVVSLRRTELDNCLQRMDQLNVQMERENKAMEEAQEKMNEALEAHQRRGLARALFAVLGAIAAVALTVATGGAAAPAAVAAAGQAVTAAGTLAQGLKTVVEILEGLQALMDLVVIIRELVENLQTIGQLIDAPEMQEMPSNADWLIFVNEVEAVAAQMPEEVFGSVAVWKAKCRNVAVLGQEMCTMAAHIAELQQQIKLEELLQEIADRQADRLLGISAADLSSFTEMLTQIDMRTTRLLLQLIKLLHIQNVAINYEYLFPANGRLSSWPVTMHTVWEMLLQQESSAITGLLALGPSTDFARTFVVHDIPVGLLVDGFDWQFAIPVMDDSSAFPIGFSRVRIRHVELKFSAIDIDASATVHQPRTDNGFIYILLQSARSFSDRRVRQAMDYEASEGLAYPYAYNLTTGVPSLTNLPSQEHANTFMRMTPFTEWRLRLSSSAEENRGLTFPTATSPDDSTQISITFHITAIRAIDFRGMDDEERSKSDSSQK

SEQ ID NO: 860 - protein, 856 aa, Nephrolepis falcata
MASLTPDYYTIYKNVNQVSRPVASRQGSEVMSIHRMYFKLDMLKVELLTEADAVKELVVFADVVEIEGQKMDLPASRFVTIVCRILLVKEEDVELSFKFLEPAPYFQALDPGSQSALVWASSTQVRLSIHAQQVLCNSTRATMRVTHPVVIGNRIDLEYRCLEGQTHCEIIASVGTVSGTMNWQIEISSDHADLSAAQRSHELRSWEGQRETVWSVVEQNEWPAFTSLLDPVLIPLARLGDSNIILGMQSTLLIAELVLSYQTHAQDTVSAAHRHLQWLITNLLQVLKGNSLKEETREQLLALLARAESASKLPLDGTHTLIVPRLQYSQYRGLISSMAAVAQAYNSEFTAVNLFIQQNEILGGYLLQQNKAFAEREKDMTAFHGLVVERRKDELRAAQETMEDLNTQLAQQTEAMDQAKQDMDAGLKRYKNEQVARAFFSVLKAVLEIGAAIFTGGATAGQAVKGAVDAVNAVSSLAGKLDMVLSLMERMEKVMEVLNAINDLVTTLSEINKMVEAPEMPSMPSMYEWDIFENEMEEVAESMPEEVTEARTWKTKCRNVAAVCRAICSTASYIGQLQYDLFAHSNQELIARRQVERLEAIQPADLTDFLEMATQLDMRTSRMLLNLLKVLTVQNGALLFHFLLEPVPFTGWVNMDMVWNALVKHEADALVARERLGPSTDFVQTYVMSDIPISLLLDGDDWIFTIDPADGSTFPLSWSRVRIQYLEMKFTGGEEYHKPASNSGAVYILLQASRNFQDRLHERVLHYEAAVPLRYQYAYNLQSGETTVSNRPSQQHDGEYMQMTPFCQWRLRLSASALENQGLAFPTVAATDLASSTTQISITFYLTAVRSINMRQ

SEQ ID NO: 861 - protein, 838 aa, Osmunda regalis
MASVDYGEIYKNVNQITRPVATKECSEVMAIHRMYFQLDNLDVELLTKANTVKQLVVFVDVVEIESDNVKLPGSSQVTIVCRILHVKKNNVALNFDFLGPTKCNGRSTRGYARIMDDSPVFELSIYAQQLVGDDGAMLRVRHPVTVATIENGHDYEVREGNMEWQIWPYSSTGLSSAARSHELKTIGDHGRERTWLIIEQEWSRFIAVVPDLIPLRWLTDSNVLLGMEATLLTAELILSYQTDAQATVAAALQHVEWLNTQLLQVVEETDLEATGERLLSLLFRAQSLLKLPVDGSHTLIVPRLEYGLYRDLINRMTDVAEKYNSEFMQMNLFIQQNEILGTYLLEQNKVFAQKEKDMEVFHSSLVTLKQQELTAAMNKMDRLKTQLTEQKTAMDQAKKEMDEGLQKYKNEQVAKAFFAVIVGVLEIGLAIFTGGATAGAAVAGAAEAVEAVSEVAKTLGKVVDILKGLEKVMEVLNAIKDLTASLAEINQMVEAPQMPDMPSEADWAIFENEIEAVAESMPTEVSEVPTWKAKCKNVAAVCREITTTATYIGQLQYDLLVQSMQQQIAMRQAERLEAIQPADLTNYLELATQLDMRTCRMIVGLLKVLTLQNGALQYHFLLPPKPFTGWVSMDIVRNKLVQHDYEAVIARSQLGPSTDFTRTVVVEGIPVTLLLEGDDWNFTIPVHDSAFPSNWSRVRIRYLEMRFSSSEEVHQPTTNTGEVYILLQAARMFDDRLKGDVLHYQAAVPLQYQYAYDLNTGETTQSNLPSEEHTGEYMRMTPFTRWRLRLSASAYENQGLAFPTATALDSTTQISITFFLTAVRQIDTRLTELMDEPQ

SEQ ID NO: 862 - protein, 878 aa, Pellaea rotundifolia
MEYGSLYGDVNQVSLRFEKTEVSEVMVVHRMHVRLEELDMSSDKLKRLYVLADVVELPSQRQTIVIPATVSAIIMCRVLYIPYIWTVVDNCTLVLPHMRFRVVETSNIAPRTGQFFALPPSDAAVDNDVGSFGGLYIHADRFIYRQATSFTSDWVQPLGLRVRGSSTFSSTFRPDWPETLPVNNLNQTITLSLGSFLTPSDSDLQRSDEIEFLQTEPQRVQVVVDRGPGSQTGLVLLVENSPEISVFPAPSLEHVPADVLADPSIILGMQMNMLSAELVLAAHNSQQVIKAVSKHVEWLNKILLQVASPSDDILALLFRVQAFIKMAKQSRFVVPRLQYHAYSNLINRMVQVAQVYDQELRQLRLFIAQNEILGSYLLQQNKAFAEKEKDMSAFHSQVVSMRRSELSSTIEMMGRLSSQMETESEAMDEASDSMVAAIQEYERKQLARALFAVLGAIASVALAFATGGATAPGAVASAGAAVTAAGRLAEGLRRVVEILEGLQAVMEVVAAIRDLVESLENMGQLVEAPEMPEMPTNADWLIFVNEVEAVAEQVPEEVSEVPVWKAKCKNVAVLGQEMCTTAAHISELQYQIRVEEMLQEIAQRQADRLMGISAADLSSYTEMATQIDMRTTRMLLQLIKMLYIQNAAIKYEYLYPASERLNSWPVTMPTVWTMLLQQENAALLGLLDLGPSNDFTVTHVVKDIPVKLLVDGYDWHFEIPVEDSAIFPAGWSRVRIRYVELKFDKQGTDSNIVIHQPSTNTGEIYMLLQSSRFLSDRKREEVMDYEASTGLAYAYAYDLSTGATTLTNIPSEAHANTFMQMAPFTAWRLRLSASAMENQGLVFPTATSPDNTTQISITFYVTAIRRIDTRRQRADAEL

SEQ ID NO: 863 - protein, 564 aa, Pellaea rotundifolia
AATIYNSRGGEFKYSVHSSPMVEIVLHAGDLSQPALMAGWSVQAKPSPDAPAVLFLHSQQVLVITSNSPPISHTSVNVVLQAEGAAQYTLYSDHHQKEGDISEGLPTEIKLERSDLNSTLLAALEATVLTTELILSYMTDATETVTQATLYLEWLNNQLLYAQNGTTDASVSLDETVDRQFHNLMFQVQCLLNKPLVATGLLVPRLQYCTYSNLVNTMARIAENYNKEFRQLTLFIQQNEILGTYLLQQNKALAEREKEMEVFHSELQQVKKDDLMRSLVKLERLEVDMKNMSAEMEQAERDMEAGIIRYRNRQVARAVFSVLGGAIAQLASAFFTGGATAGPAVAGAANAVNQVTEVVTSLQRVVETLEKLVLVTEFLVAMRDLMNAVNDIHGGVPEVPALPDMPSDAEWAIFENEIEAVAAGMPEDVSEALTWKAKCKNVAALGREMVTLATVIGQLQYEIKVHELLQEIARNHSERLEAIQPADLKNYQEIATELDMRTIRMLLGLLEVLSLQNAALHYQYLLPPSPVTTANTNISMSTVWALLLQHEAVAVIRLADLGFA

SEQ ID NO: 864 - protein, 895 aa, Pellaea rotundifolia
MAAGSVGVDYRELYKDLEQISERVRMEQMEFSEVMVIHRMFINLRDLDLGHLEGAERVKRLYVLADVVEAQQSHEGANSLLTPTARFPGSISVVILCRVLWLREVSYGARITAFNVMWLQLPHTRLHAVERSATSIRMYRHGEDEDDDAYPALCIHASIVEYSKIERGHAVPQPSPSTYILRCFALRPSPNSSTNLVFSSQSRSLVDAPVREYFVYPEARNVFPSTFPTSAIIDPASLFRDWYTFRLASVTLNLSAADVSKDQLEPAISLLKDNIPAAILTDANILLTLQISVLIAELVQLAHPSKDTVEAIAKHVEWLNKLLLQATSNSTGMSSHDDYLALLFRVQCLMKTRRRARSLVVPQLQYNVYSNLINRMAQVAQSYDQALQNLKLFIVQNRILGSYLLEQNKAFAERERDMEVFHSEIIAQRMLELKNTILKMDHLSVQMETQREEMDRAREDMEAGLREFQNREVARAMFAVIGAIAMIGLAFVTGGAAAPGAVAAAGNAVTAAGQAARALQRVVEILEGLQAVMEVVVLIKDLVESLQNINQLVDAPEMPEMPSQADWSIFINEIEGVAEEMPVEVSEVSAWKTRCKNVAVLGQEMTTTAAYISQLQYDIKVNSMLQDISRGHADRLSTLRPADLSNYLEMVTQMDMRNTRMLVSLIKVVDMQNAALMYQYLSSPTPLNAWPVTMETVWSMLVQHEHGAVLGLMSLGPAFDFTRTYVVKDIPVSLLLQGEDWEFEIPVQDFVTFPSTWSRVRIHHLEMKFVKDSAHQPTTATGSVYMLLQGSRIFHDRRNHVIRSTDTILHYEAAVSLDYHYAYRLDTGDTTLSNLPSHDFLTTFMRMTPFTNWRLRLSASAEENKELDFPTATSADATTQIAITFHISAIRQTSL

SEQ ID NO: 865 - protein, 544 aa, Pellaea rotundifolia
MVEIVLHAGDLSQPALMAGWSVQAKPSPDAPAVLFLHSQQVLVITSNSPPISHTSVNVVLQAEGAAQYTLYSDHHQKEGDISEGLPTEIKLERSDLNSTLLAALEATVLTTELILSYMTDATETVTQATLYLEWLNNQLLYAQNGTTDASVSLDETVDRQFHNLMFQVQCLLNKPLVATGLLVPRLQYCTYSNLVNTMARIAENYNKEFRQLTLFIQQNEILGTYLLQQNKALAEREKEMEVFHSELQQVKKDDLMRSLVKLERLEVDMKNMSAEMEQAERDMEAGIIRYRNRQVARAVFSVLGGAIAQLASAFFTGGATAGPAVAGAANAVNQVTEVVTSLQRVVETLEKLVLVTEFLVAMRDLMNAVNDIHGGVPEVPALPDMPSDAEWAIFENEIEAVAAGMPEDVSEALTWKAKCKNVAALGREMVTLATVIGQLQYEIKVHELLQEIARNHSERLEAIQPADLKNYQEIATELDMRTIRMLLGLLEVLSLQNAALHYQYLLPPSPVTTANTNISMSTVWALLLQHEAVAVIRLADLGFA

SEQ ID NO: 866 - protein, 866 aa, Pteris cretica
MADVDYSVLYKDLNQISIRLEKMDFSEVMAVHRMFVRMDDLDVSSGTSGGLLVGAEKVKRLYVFADVVELPSKQVRLPGSDMIVILCRIFVQNGRHSTELFLPSMNVSMGAAGNGSIRGANLSTTIMSSSSNVLQFKLQSGTMTSAVRLKDVDAAAALTCDVQAVSASMPLTVMATGTSPGNIWVLGMTTAVVVPKSAVAVITEANILLGMQVTVLIAELVKTAYNSDAVIAAVTRHVEWLNHLLVQAHAAAPKLGMQVTVLIAELVKTAYNSDAVIAAVTRHVEWLNHLLVQAHAAAPNEDVVTLLYRTQAFLKLQREGLVVPRLQYHMYKNLIDRMVQVAQSYDQDFKQLKLYVEQNKILGSYLLEQNKAFAAKEKDMDAFHTQIITLRTTELNNTIERMDQLSKQMDEENEAMEQAKADMDAGLIEYQNKQVANALFAVLGAIASIGLAFATGGATAPGAVSAAGAAVTAAGKAAEGLKKVVEILEGLQVVMEVVAAIKELVQSLQQIGKLVDAPEMPDLPSNADWEIFVNEVEAVAEQMPTEVKQVPTWKAKCKNVAALGREMSTMAAHIAELQYQIQVQEMLREIAQKQADRLSSIKPADLTNYLEMVSEMDMRTTRMLLELIRVLYIQNAALQYEYLQTPAPLDAWPVAMSTVWNVLIQQEMSAITGLLELGAPSDFTQEYVVKDIPVSLLQGGQDWEFELPVSGADFPSSWLRVRIHHVAMQFDGSAAHVPTTNSGEVYMLLQSSRFFDDRARRATEFISYEAGMGLYYQYAYRLATGEATVTNIPSVEYANTFMRLTPFTRWRLRLSASAHENNGLAFPTATSADATTQIKITFSVSAIRRIISTYNPHISLPSDVDR

SEQ ID NO: 867 - protein, 873 aa, Pteris cretica
MDDEMEQEGLKVFAAQSDKDYEALYASVNQIARVVGMSKVRCGEVLAVYRMFVRLDSLDVAHLLQPERVRRLIVFADIVEIDKNSVALPGSALVLINCRLLHLKNRDVQLDLPYWIVENNHNAVALPRCSVRAQQVVVSPNAPTPPPLSSNGSLIIRVKLDLKWADNSPFTQYIVRYFSYNSHEAYTDIKAPVSTSKPPSFHWLLIPPLSDRRIKTAAINDIKWQADIAFQEALPSLDDLRNPHVIKGMESTVLIAETILIYRSDLMDAVTEALQHVQWINKSILEAVRLPNSESGLQLKRLAAHVQMLLKFPVDGSHSLKVPRLQYGKYDDLINRMSVVAEAYDSEFKTLKLFILGNQIIGDYMLTQMKLLAAKEKDVAGLESLIVLRKERELKEALETIDSLEKQLLKQFNEMTEAKTQMEQGLKEYENKKSAQALFAVLGASMQIAGSLMSGNISGVIGGVGGSISAMKDAIDAMDDLAASRSLLNVASGLVEVNRVFEVVNAVSELYETATSLEDLLEAEKMPNIPSSDWDMMENEVEAVAATMPTEVSEALVWKAKCKNVIAVCRELCSTAVSMSELQYDLFVHASMQEIAQRQAERLEEFRASDLGEVTEMATQVDMQTMRVLLSLLSTLAIQNGALQYNYLMVSEPFTGWPTVENVRSSLVRRQQQAIIESSHMGPSTIMPPHAYVLESVPVGLLLSGEDYMFTIDPSCSDFEDSWSRVRILHLEIKFTGGHLPRAGPRNEAYFLLQASSQFQDRWGAQVFHYEAAAPLMYQYAYNLNTGATTLPNMPFEEDTFLRMTPFTHWRLRLSASSPRNEGITFPTALAPDSTTQITVAFTVTAHPRPYVSFSLDGKIDVEQIPEKQPEDQ

SEQ ID NO: 868 - protein, 889 aa, Phegopteris hexagonoptera
RDSVDFGEYRDLNQVSERIRLDQMEFSEVMVIHRMHIKLSELDLGHLDGSEKVKLVYIFADVVESDEEQTGALPVRLPGSISVFIMCRVWHVSAYVGNNGRNHRRVLRLPHMTLHFRNSSSALRSLYRIDPATREDVSEPALSIYADVVQAVLQNPANIPTTSISTDELYFEASGSEILYTRQVLHERVGLFVVRFSQWGIPVTPSVLAHNYSVTSLTNASLASGGGPLPTSIYSPAFSRGMLTSDIPVTFLTDSHILPAFQTSVLIAELVELGRPSQATIDAVGKHLRWLSKLLLKVIEETKGTAFRQDEYLELSFRAQCLIKKMGNIRSLVVPQLQYSVYSGLINRMAQVAESYDQSLTQFRLFIQQNRILGSFLLEQNRAFAQREKDMDAFHLELISERETELENTLEKLDQLNSQMQEESAEMERARERMESSIMEFQRRTILRAVFSIFSALAALSLSFLTAGAAAPAAVAGASAAVNAVSTAATIAVTLKRIMKMLEILETVMEVVAIIKEVISNMQLVDELANAPEMPAMPSDHEWLMFENDIEEVAEEMPPEVSGVSAWKARCKNVAVLGREMITTTTYISQLQYEIKVQRMLQQIAKRQAERLLAIQLPSLTNYTEMVTEMDMRTTRILVTLIKVVEVQNAALMYQYLSQPTPVNAWPVTMDTLWRMLVQHEHSAIRGLLRLGPSFDAGNCNYVVRRIPVYLLTHGEDWQFEIPLQLNDDDENEEDEYPAQVPFPTSWSRVRIHHLEMKFVRAPHVHYPTTKTGSIYILLQGSRIFEDRNQGARVHFEAATSLDYHYAYRLDTGETTLSNVPSIEFTQTFMRMTPFTTWRLRLSSSAIENEGLAFPTAMQSGPDSTEIHPDATTEIQITFNISAVRQISF

SEQ ID NO: 869 - protein, 896 aa, Phegopteris hexagonoptera
MIAAGAEDKLMSTCTYESVSPGSAESPAKRIDDDEAAAADEEYLQDDMSSMYAYEKLADDHDHYADYEAIYNGLNQIARAVGIRNTVECGEVLAIHQMFMRLDTLSVENLLRPERVKHLIVFADVVEIEGAALTLPGSTLVLIACRLLRVKNRDVVLNLSWNLASSSSPPRCSICAQHVITTSSTPLSGCTLLIQVMHALTWSNGSTFTQYFGRQFSYSSQNSSSTAPPPNQSLSSIGVPPSSNFILVNSKTLNILINNIRWKGYIDFQVGLPSFDDLVEPHFIDAIESTLLIAEMILTFQTNVRDAVTAAKEHVEWINMALLQVVDGPNSDARFRLKILLARVQMLLKLSLYGSTPGLVVPVLEYGVYDRVIKEMVRVAELYNNEFNQLNLFIQQNQILGNYLLQQSKVLAERERDVEALESSIVARKRQELNGSIRRVELLEQQLQALASEMDEARENMETGLQVFRDRQIAFAFFAVLGAALQLGGSLRLTSIPEIVVGIGTSISDAVNLAQQVENAVASNNLVDVASKLVEVEKVIEVVNAIKQLHDNETELDDILNAPEIPIIPSSDWDIMENNMEEVAAGMPTEVSEVVTWKTKSKNVIAVCREICRTAISVSELQYELFVHGKQQEIAQRQAERLQQIQTVELGEYIEIATQVDMQTMRLLIILLGNLAIQNGALHYHFLLAPEPLTGWPSIDSVRRHLILQEEKALLAEEGMGVPVRLTREYVVEDIPVSLLLSGNDWIFTIDPSSLSETPVFPNTWNRVRIRYIEMKFTGEHLPQSPNTGKVYLLLQASSMFQDQYAQQVFHYEAATPHSYQFAYELDTGVTTLPNLPAQEGRHFLMTPFTRWRLRLSASAYQNQGVFFPGPASASTNISITFHVTSVVGIQTFHDI

SEQ ID NO: 870 - protein, 592 aa, Polystichum lepidocaulon
AHPSADTRATTARHLEWLSGILLQALSKAEGTPSHKEYLALSFRAQYLMKTKGTTRRLVAPQLQYDVYSPLINRMAQIAESYDNSLRQFKLFIAQNQILGNYLLEQNRAFAAKERDMDVFHSELVSQRENELKSTLNRMGHLSTQMDIQVAEMNKAHEEMEAGLRRFQNRRVAEAMFGVLRAIGAIALSFFTGGATAGLAVRAARSAVSAAGALQRVMDTLEDMQAVMEVVFIIKELVESLQDIGTLVNAPDMPEMPSKEAWDIFENEIEGVAEEMPEEVSEVSAWKTSCKNVAVLGREMITTAVYISQLQYDIKEHTMLQEIAQRHADRLSTIKAADLSSYTEMVMQMEMRTARIMVALIKVIHMQNAALMYQCLWPPTQVTTWPSLTIETVWIMLMQHEHSALLGLMRLGPSFDFMRTYVVKDIPVSLLLNGEDWEFEIPVNDYITFPSTWSRIRIHHLEMKFAQGAHVHQPTTDTGKVYILLQGLRTFYDRNEGDTLDYEAAMPLDYHYAYRLDSTGETTLSNLPSNDFIKTFMHMTPFTNWRLRLSASAEENKGLAFPTAEEDRKTGSDATTEIAITFYISAIRRISF

SEQ ID NO: 871 - protein, 718 aa, Selaginella erythropus
SSIIGVAAAAAGSYHIMGNAGSINYEEIYKNANNIGRSMATPMCSEVMSVARMYLRISDLHPTRLKQPEIVKELYVFADVLRLDSFEIVLPGSDIVYILCRMLHWTIPAPALGSTVYIQTPWLKLSSATVIICPQLQQSPLEWFIKAEHSTRTDAPAPLFLHAKQVLTTSNTGSSHLNVVLQLAQEVAQTYMLSDQRDVIDVNVESGYTLSRRDLNSTLLSAMEATVLIAELILRYMTHATETVVEATLHVEWLNKLLVNALKDTSTASGSDDEAVDKQLHNLLFQLQFLLTRPLGAGVIVPRLQYSTYSNLVSTMGRIAENYDKEFKQFTLFIEQNEVLGTYLLQQNKAFAEKEREMEVFHSELQQVKKDDLTRAFAKLEQLEVDMREMSAAMEQAEKDMEAGLIRYRNAQVARAVFSVLSAIAQLASAFFTGGATTGQAVAGAANAVNQVTGAVSSLQRVVEPLEKLVLVTEFLVAMRDLVNAVNDIVQQVAPEVPALPDMPSEAEWAIFENEIEAAADEMPEEVSERLQWRAKCKNVAALGREMVTLATVIGQLQYDIKVHELLQEVAQNHAERLEAIQPVDLKNYQEMATELDMRTTRMILGLLEVLSLQNAALHYQFLLPPSPVTTASTTISMSNVWTLLLQHEAAAVISLRICDRPRGDVCCQGHTRWLAARWGGLGLSDLRQRCGRFPIWLEPCADLICRDEVCKSWYRIR

SEQ ID NO: 872 - protein, 702 aa, Selaginella erythropus
MGNAGSINYEEIYKNANNIGRSMATPMCSEVMSVARMYLRISDLHPTRLKQPEIVKELYVFADVLRLDSFEIVLPGSDIVYILCRMLHWTIPAPALGSTVYIQTPWLKLSSATVIICPQLQQSPLEWFIKAEHSTRTDAPAPLFLHAKQVLTTSNTGSSHLNVVLQLAQEVAQTYMLSDQRDVIDVNVESGYTLSRRDLNSTLLSAMEATVLIAELILRYMTHATETVVEATLHVEWLNKLLVNALKDTSTASGSDDEAVDKQLHNLLFQLQFLLTRPLGAGVIVPRLQYSTYSNLVSTMGRIAENYDKEFKQFTLFIEQNEVLGTYLLQQNKAFAEKEREMEVFHSELQQVKKDDLTRAFAKLEQLEVDMREMSAAMEQAEKDMEAGLIRYRNAQVARAVFSVLSAIAQLASAFFTGGATTGQAVAGAANAVNQVTGAVSSLQRVVEPLEKLVLVTEFLVAMRDLVNAVNDIVQQVAPEVPALPDMPSEAEWAIFENEIEAAADEMPEEVSERLQWRAKCKNVAALGREMVTLATVIGQLQYDIKVHELLQEVAQNHAERLEAIQPVDLKNYQEMATELDMRTTRMILGLLEVLSLQNAALHYQFLLPPSPVTTASTTISMSNVWTLLLQHEAAAVISLRICDRPRGDVCCQGHTRWLAARWGGLGLSDLRQRCGRFPIWLEPCADLICRDEVCKSWYRIR

SEQ ID NO: 873 - protein, 575 aa, Polystichum polyblepharum
CGSDQRDVIDVNVESGYTLSRRDLNSTLLSAMEATVLIAELILRYMTHATETVVEATLHVEWLNKLLVNALKDTSTASGSDDEAVDKQLHNLLFQLQFLLTRPLGAGVIVPRLQYSTYSNLVSTMGRIAENYDKEFKQFTLFIEQNEVLGTYLLQQNKAFAEKEREMEVFHSELQQVKKDDLTRAFAKLEQLEVDMREMSAAMEQAEKDMEAGLIRYRNAQVARAVFSVLSAIAQLASAFFTGGATTGQAVAGAANAVNQVTGAVSSLQRVVTEFLVAMRDLVNAVNDIVQQVAPEVPALPDMPSEAEWAIFENEIEAAADEMPEEVSERLQWRAKCKNVAALGREMVTLATVIGQLQYDIKVHELLQEVAQNHAERLEAIQPVDLKNYQEMATELDMRTTRMILGLLEVLSLQNAALHYQFLLPPSPVTTARWTLLLQHEAAAVISLRICDRPRGDVCCQGHTRWLAARWGGLGDGEDWDFPISVRDAEDFPSGWSRVRISYVEMKFVRAGTGSDEEVHQPTTDTGKVYMVLRGEQLFADRKRGASLKYEAATPVEYQNAYRLVTGVGSSSSCR

SEQ ID NO: 874 - protein, 575 aa, Polystichum polyblepharum; identical to SEQ ID NO: 873

SEQ ID NO: 875 - protein, 609 aa, Polystichum tripteron
FIFYFFFHVQTAHNSPQLIKAVTRHVEWLNKMLVQLASPNDDILALLFRAQAYMKMAKQPHPVVPRLRYSMYSGLINRMVQIAQSYDDELKQLKLFIAQNEILGSYLLQQNQAFAAKEKSMSVFHSQVVSLRRIELDNAIEKMNRLSYQMDVEREEMEQARKDMEQALDDYEKKQIANAVFAVLGAIASAALGFVTGGATVAGAVAAAATAVGAIAKLAAMLNKVMGILEIVQQVVETVAALKEVVESINNIGHLVDAPEMPEMPSNADWLIFVNEMEAAADELPAEVGERTVWRAKCKNVAVLGQEMCTTGTHIAELQYQIKVEEMLQEIAERQAERLEGISSADLSSYMEMASQIDMRTTRLLLQLIKVLHIQSAALRYEYLYPASERLNSWPVSMETVWTMLLQQESSSLLGLLQLGVPNDATRTYVVKDIPVEVLQSGRDWPFVIPVDDYADFPSGWYRVRISHVELKIDQQAAGDANDIVIHQPSTATGKLYLLLQSSRFFSDRKPREVMEYEASMGLAYAYAYNLNTGEATLTNIPSSAYADTFMQMTPFTTWRLRLSASAEENQSLVFPTANSPTSTTQVSITFHLTRIRRIESRTFVGDVE

SEQ ID NO: 876 - protein, 721 aa, Polystichum tripteron
MGVPNHIMQLYKDMNQVSEAMRLDQMEFSEVMVIHRMYIKLEELDLGHLEGAEKVKRLYVFADMVEVGQSVVARLPGSFMVVILCRVLWLPDEGSTPFIMLPHLMKLRAVETSEPMQVPVGGDEMFLTGLGLFRAESDEEYPSLCIHAGVIQFSLRKVWSPSQRQFSIFNPHPPPTSTPLENIVFSSPYRKPDTRPVLRFFTSTFLNQRSQITTGPEYFTLDPASRAYTTLSIVTDPPVHWPPASVFDVNTLHPTFSVLDANIPDVLLTDDKILLAMQTSMLIAELVEVAHPASEDTRATTIAKHVEWLSGILLQALSKVEGSPSHYEYLALSFRAQYLIKTRRTTRRRVVPQLQYDIYSPVINRMAQIAETYDDSLRQFKLYIAQNQILGSYLLEQNRAFGAKERDLEVFHSELISQRENELRNTLIRMDDLSRQMDKQTAEMDKAKEEMEAGLRRFHSRTVANAMFGVLGAIGSIALGIFTGGATARRSARRAVSAAQEATRAANTLREVMRILERLEVVLEVVSILKELMESLQDLSTLVEAPEMPDLPTELDWNIFDNEIEGVAAQMPSEVSEVSAWKTKCKNVAVVGREMITTAAYISQLQYDIKEHSMLQEIAQRHADRLSAIKVADLSSYTEMVLQMEMRTARIMVSLIKVIHMQNAALMYQCLWPPTEVTTWPSLTIETAWIMLMQQEQSALLGLMRLGPSVGGEGHSCKPTA

SEQ ID NO: 877 - protein, 869 aa, Polystichum tripteron
MMMRPGFRTDVREDYEVIYAGSNSITREVGLSKVKCGEVMAIHRMFMRLDTLSQELLQQPELVKRLIVVADVVEIEGSGGILTLPGSFSVLIFCRLLILKRKDVVLDLGSWDLRVATTTPPLPRCSIRAQRVVIASSSPLASLLIQVKHELQWSNGSRFDQYFGRPFSFNSSEISSRSFPTTTTSTTSTKLAISTWPGTTPVSNFILVSSEKFNVLVNAVPWKGVIDCQAALPSLDDLMHPDVISGIQSTLLIVETILNYQTNNPTIILAAQQHVEWIVDSLLQVVHLPNSTTDVLELKTILARAQMLQKLPTDGSVQLRVPLLDYGEYQEDIDQLLINAAAYDQEYKELTRFVQQVQILGSEFLELSKNLAEKERQIETFESLAVIRKQNELDQAMRRIKTLQREIGRRSYEMAEARITMEEGLEDYKRRQLQNAVFGLLGALLQLFASVTFGGGAIDIAGAMATTVSAAIDTINLVEDSSASSKLLPMTQNLVDIEKVIEVVNAVNALVESATELEDIIHAPELPLISSYEWDIMENNIEELAALMPSEVSEVVTWKAKCRNLVAVCREICIAASFASEVQYELFVHARQQEMARRQAESLEQMQLASDLSAYVELATQADMRTTRLLLSLLNVLASHQGALYYHYLMEPEPFTFSWPSVDNVRMYLLELNHKARARESTLFGTGVLNVDMEQDYVVDSIPASLLLSGEDWNFTINPGRNASVFPVPWDYVRIRYVEIKFTGQHQPVTQTGEIYLLLKSSANFQDRFEDQVLEYEAAVPLVYQYAYNLGTGSTTVTNDPSTKGKFFRMTPFTHWKLRLSASAYQNEGVSFPTLLNAASDSPVQITITFYVTALPQIQHFSGGPTMEV

SEQ ID NO: 878 - protein, 852 aa, Polystichum tripteron
MEKDNPISGLGERSFYPPTPPVDSVTQAGNDLWLSFPGADKRDVYAHIYSNVNPIGTRAVSTPEPGKVVSVARIYLRLDQVIGHGADAAAGGIIQEMYIFADVIEIEGAKLNAEWEETVLGCHQYILLCNKLLADLTGIRRLQNLMRRVPLVVRLTNRHEPHLTMFTGRLFSPGAPVPHSSVVVHCNQFYCTDNNIINPNYVGLPPIPWAPRWALQHPSLLMAMESTITTSEVILHFIANTEGVDRLVEAMVSHVQWLNLTLLQALQERGTEQSAADLHELRMLFFRTQYLLKWPPGQISILVPRLHYTRFDNLIERMANVAEVYDRDFKQLTLFVAHNQAQGTYLFEQNKALAEREQDMEIAHSALYSMKEADLRRGIQNLETLGGQMQEMNAEMDQAREDMEAGLQRYRDQQIARAVFSILGAIAAIGVAILTGGIGARSALSRSKDAVNGVQTAVQTAARLKAVLKTVEKIVELVDVIWELKELIEEVADLAGMSLETPSRADLPEVPSAAEWYIFENEIEAVAADMPTEVSEVAVWKAKCKNVAALGREMTMQCVVVHELRYDIETHRLMAEVARSHADRLMSIQTFMDLTDYQRMATEIDMRTTRITLGLCKVLSLKHAAMRYEYLLPPSPLSITSFTISTIHSLLINQEVTAVAALNDLGIPTDHTITYLVRDIPIELLLDGEPWDFNIDSMADNLDFPSHWKRVRISHLQLHFTGARLPSTDTGAIYTLLESGSTFFDRGRPQLQEAIIQYEAMVPVAYQYAYDLQTGETTLSNKPSQQFANHFMRMTPFTQWRLRLPRTALENQGLCFPSPTPTPADATTQVSISFHLTAIRSRVHEHTVLRML

SEQ ID NO: 879 - protein, 675 aa, Polystichum tsus-simense
CNPASRLFHRRRHSPYSAGASTAAHSFAAATKSTFGAGTAGLIWTVSEVKKWYPSFKIVLPEVVPLQLLANSNIVLGVEVTALVSELIMTYQRQATELVAATLQHVDWLNTQLLSAQYSSGQLQALHFRVQALLKLLVGDDDAPLVVPPLQYEVYDDLINLMTSAAESYDNAFRQLNLFMQQNEILGSFLLDQNKAFSAKERDMESHHSQLVILQEAELTATNESIKSMNNELAQQNEAMDKAKADMEAGVKQYKDRLVAEAVFGVFRAIAQVCLAIFTGGASAAGAVETARKLSETAKALQSAVTHLEKLEKIVQVINSVTAFLENLQSLNQLIELPKMPDLPTEADWDMFENEVVAVAEGMPTEVSEVPMWKAKCKNVAALGREIIRTVAYMHQLQYDLAVNRMLQNIAQRQAERLEGLQIQDVDNYTEMATELDTRTNRMIMGLLKVLSLQTAALSYHYLLPPRSLTGWVNMDTVWNTLLNNKYDAVKALSSLGAAPTDTIQTYVVRDIPVGLLLEGNDWFFDIPIDDPAFPAPWFRVRIEHVELKFDPTSVHLPTTRNGQVYILLQAARFFADRVYGVVDEVLHFQATNTVHYQYAYRLDTGETTLNNRPTISSAAHYMRMTPFTRWRLRLSASAPQNEGLAFPTATTEDATTQITINFHLTGIHRIQYHA

SEQ ID NO: 880 - protein, 851 aa, Polystichum tsus-simense
MVDYGVVYAHVNEVGRRLGTGKVKCTRVLAKQGMLVRLDELTMEGLQDPYAVEQLVVFADVIEVAGTSVNFSAPIITIVCRILVLLDDSTRLDLTLPRAWNSLSNPARFSIFAQKVVSATPEPRRKSVVLQIRWRGSDMRGAEDVLPVSTAASDLGAEDVSPVSTAVPDLETAWGSIIFVLQGVPDAFRGRVEMNVLASLEVLLDPNVIISIQSTLLIAELILSYRTDLPETVQAAVEHAQWISNTLLAVCNFKCFHPYILHLPCTLMTMTITTCMAFTLMIFQVEASLNSSEEALELRNLLARAQMLLKFPTDGSQSLIIPRLEYRGYQSLIDRMAIVAESYTSELGQFMAFITQTQILLDDLVARTKAFAEKERDVADLQSSIVLRKRTELLQAEQTMMRLNDQLNKQAKDMEQAQHDMEQGLQEYKDREVARAFIGLLVAVVEVGVSFATGGLTALPAIKSSISAAKGLARLAEMIKAVIEVMERLAEAMEVLNAVRELIDAVAASKEIFEAPEMPDMPSIAEWDIFENEIELVAESMPEEVSEARVWRAKCKNVAAVCREVTRMGVYISQLQYELFVHAQQEAIARRHAERLEQIEAANLDNYLEMAMQIDMRTTRLLLGLLKMMSIQNAALQYHYLLPKEPFTGWPTIEIVRRRLIQKESQAVHGLEAMGMTTNFTRTFNVEDIPVDLLLSGEDWNFAIPPDSNSPFPLTFSRVRIRHVEMKFANTLALPSTTSGKLYILLQGSRTFHDRRFHEILEYEAAVPNAYPYAYNLSTGETTLSNEPSEHDAGNLLFFRMTPFTNWRLRLSSSAFENEGLLFPQGSTTTIIEITFHITAIRSIDTRLEVS

SEQ ID NO: 881 - protein, 886 aa, Pteris ensiformis
MEYSSLYGDVNQVSLRFQNTEFSEVMVVHRMHVRLEELDMTGVEGIEKVKRLYVLADVVELPSRATTVFEYVRLPATISAIILCRVLYIPEVQRLSGSAFVAQCSLDFPFMRLHVVGTSEGGAGVMQAFSSDAAASSIGVYLHADRFIYRQTTSTASDRVLPLDVRVSSGSSTFSTTARPDWPENLNVSFVTCGPQFLSKGPPLTSSDSDLQRSDEIELLDRQDGTPLLHVAFNPLAPGNVGGSQGRFQPSSACSFFHVPPPDVSADVLTDPSIILGMQMNMLIAELVLAAHNSPQVMNVVTKHVQWLNKILLQVASPNDDILALLFRIQAFMKMAKEPRFVVPRLQYHMYGSLINRMVQVAQNYDQEFRQLRLFIAQNKILGSYLLEQNRAFAEREREMSAFHLQVVSMRRSELRSAIETMNTLSLQMQTESEAMNEAQENMVEAIQEYERRLLARALFSVIGAIASVALAFATGGATAPGAVAAAGGAVSAAGRLAEGLQRVVDILQGLQTVMEVVVAIRDIVESLQNMGQLLEAPEMPEMPTNADWLIFVNEVEAVAEQVPTEVAEVPVWKAKCKNVAVLGQEMCTTGAYISELQYQITVEEMLQEIAQRQADRLVGISAADLSSYTEMASQIDMRTTRILLELIKMLYIQNAAIKYEYLYDANEKLNSWPVSMETVWTMLLHQENAALLGLLNLGPANDFTVTYAVKGIPVKLLVDGYDWNFEILVEDFAIFPSGWSRVRIRYVELKFDQQGTDSSNILIHQPSTNTGLVYMLLQGSRFLHDRKRGEVMDYEASMGPVYAYAYDLHTGATTLTNIPSQEYANTFMQTTPFNAWRLRLSASAMENQGLVFPTATSADSTTQISITFYVTAIRRIDHRQEGNVE

SEQ ID NO: 882 - protein, 878 aa, Cyathea cooperi
MEYSSLYSNPSLVNPNFQATEFSEVMVVHRMHVSLSHLNINTANSLLQPTLLQGSDKVKRLFIVADVVEAPTSRVFLPASLSVVVLCRLLYVTVPPPAFDTFGPAVTLTFPFMRFFVNEAIADFFPSKDDDAGIGCYIHADRIIRRLAMPQSDLRLRLIMTAEGPSTFSRDNWPISHFRFTQETVTADEPVAMADSELQRSDEYQQKDATVQFPLAVITFNPWLPPNGISDMGRGLDTTRPPVFCYFQFRSDVPSHILSNPYIVLGMQMTMLFAELVQVAHNSPHLLKLVTKHVEWLDKLLHQVTSPNDDILGLLFRVQVFKRTSERRHFLVPMLQYHMYSNLINRMVQAGEAYDRDLRNLQFFIATNQILGNYLLQQNKAFAEKEREMSGFHSNVVEMRRDELRNALDKMDLLALQMERENQAMQEARDALDKAILEYQRRLMANAILSVVRAVVSVALAFATAGATLAGAVASAGQAVSAAGQAAASLNKVVATLQALEGVMTFVIALREVVDSLGNMNNLINAPEQPELPSDADWLIFVNEIEAVAGQMPEEVVGPVSVWQSKCKNVAVLGQEMCTTTAHIGELTHQIKVEEMLQGIAQRQADRLNAISSPQDLSSFTEMLSEIDMRSLRLLLQLIRLLYIQNPALKYEYLFTTTDYLDTWPVNMETVRNVLIQQEAQAIRGLLQLGPSNDHTLTYVVKGIPVGLLVEGHDWVFSIPVQDFDAFPEGFSRVRIRYAELKFDAADQQTEGGMIHLPSTNTGLLYLLLQCSPSFADRKQQEVLDYEATSGVAYAYAYNLHTGAPTLTNIPSPEFANTFMRMTPFNTWRVRLSASAPENQGLSFLTANSPDDTTQITITFHFSAVRRIHHDPSQGTPI

SEQ ID NO: 883 - protein, 882 aa, Onoclea sensibilis
MEYSDLYADVNQVSMRFRETEVSEVMVVHRMHVRLQDLDMNGMPTNYSTVRRLYVVADVVELPSIVSNWMRFPGSLSVVILCRVLYVRDFNSVLGSCSLNFNFMRLRIVETKLGSVNVFPVPASASEDANNIGVYIHADRVIFRQDTSSSNIVRPVQLFVLGGSTFSTEVRPDWPTSLEVISIHLWPTLSKGQPISAAESDLQRSDEFELLPSPVGPDKVSIFFPSANPAPGNVIGQVLDVENIGAAFAFFHLPPLDPVPTEVLTDPYIISGLQMNMLIAELVLAAHNSPRVIKVVTKHVEWLNKMLQPKLHAAKDDILALLFRVQSFLKMAKEPRSVVPRLQYHMYSNLINRMVQVAQAYDQEFKQLQLFIVQNQILGRYLLEQNRAFASRERDMSSLHTQVVALRRTELNNAIDKMDLLSVQMERENEAMDQAKEDMMQAIEDYERRQVANALFAVLGAIASVALAFATAGATAPGAVAAAGAAVSAAGRLAEGLKRVVEILQGLEAVMEIVAAIRHLVESLQNIGSLIDAPAMPAGMPSDADWLIFVNEVEAVAEQMPAEVVGSVAVWKAKCKNVAVLGQEMCTTGAHIGELTYQIKVEEMLKDIAERQANRLEGITAADLSSYTEMLSQIDMRTTRLMLQLIRVLHIQNAAVKYEYLYDASRQLDSWPVSMETVWRLLLQQESDAITGLLSLGPSTDFTRSFVVKDVPVGLLLDGNDWQFVIPVEDSVAFPIGFSRVRIRYVELRFEQGSNDDGAAIHQPRTDSGSIYLLLQSSPFFSDRRRSAILDYEASMGLAYAFAYNLTTGVPTLTNVPSQEYANTFMRMTPFNNWRLRLSSSAEENRGLAFPTATSPDDRTQITLTFYITAIRGIDTRVLADE

SEQ ID NO: 884 - protein, 870 aa, Onoclea sensibilis
THFLECVGYWALCWRHQFPQPTCTIMGNVMTGPSYEEIYKNANYIHRSVATPICSEVMSVSRMYLALSELDVQRLKNPEIVKELYVFADVIFWDVFPTWPGLEAVFILCRVLVVDTRHLVAPSASSDGAEAAAADASVSIRAPWLNAPSTTFLISRREQIMPPFSCSIRAKHSTTRASTAPAAFCLQTEQVIDTSFSTNSAVSDNIVLKLETREGSSADDETVDDHIRESFPEVTLSWADVNLTLLWAMEATVLVAELISTYMSSSTRTVKEATLHLKWVNQLLIHALETKDGAPDAAVERLFNTLVLQVQLLLNNPSLVAGIVVPRLQYSTYRNLISTMAHMADGYTREFQQLIMFMEQNEVLGTFLLEQNQAFAAKERDMESFHAELHKVKTNDLIQALATLEQLEVLMTEMNAEMEQAQQDMEEGLRRFRNRQVARAVFSVFRSIVAIASSFFTGGATAGAAVQSTKNAVDQVVEMKSSLERIVETLEKLLLVSDFLVAMKELINAVQDVHGVAANVPTLPDMPTEAEWTIFENEIEAVAAEMPEEVSEVLVWKTKCKNMAAIGREMVTMATVISQLQYDVRMHDLLQEISRNQAERLEAIKPVDIRNYQEMATQLEMRTTHILLGLLEVLSLQNAAIQYQYLMPPSPVIMNNTIITMSDVWTQLLQQEAAAVVALSDLGFPTDRKVTYVVEGIPVGVLLDGQDWDFSISTEDVDHFPFGWSRVRIAYVEMKFVSARLGRSTEPAGNEDQIHEPITDTGEVYMILRGEQTFADRKRGEKVKYEAVAPVKYQYAYHVETGEMTEHNRPTEEFANHFMRMTPFTRWKLRMSGSARENRGLAFPTATAMDATTQIAIHFHVTAIRAADWH

SEQ ID NO: 885 - protein, 889 aa, Onoclea sensibilis
MARSAEAADAWREVYRDLNQVSERMRLDQLEFSEVMVIHRMHIKMSELDLGHLPGAEKVERLYVFADVVECDTPPYHSWSGPDLVIRLPGSMSVTFMCRVWHINHGVSQLQSFLDAKTLVLQIGHMRWHFNQTTGSMHRLDPQTLQNSPEPCFCVYAEVVRVAFYPDVTFPEFNNSPDLQFLQLQFGSDQLRFTSQTTNQPVWAIRGSLTFSMIPDNDGLLNEVSSQPAGTSFVLNMPDNLNVQLYANLNATSGTTLSRDPDSIIPAFSVLREKAVELLTDPNILPAMQTSMLIGELVEVGHPSEATLEVVRKHVEWLNHLLLQVIEAKQGQDVQDYIELSFRAQYVIKKVGRIHRPVVPQLQYNAYSNLINRMAQVAESYDQALRQFRIFIEQNKVLGGFLLEQNRAFAEKEADMDVFYSELITQRQIELDNTLQKMEHLGSQMDTQRADMEQAQADMEAGIRRFQDEQVARGLFAVLGAIAAVGLTVLTGGAAAPIALTAARRAVTLAGAVAQGLQRVLDILEGLQAVMEVIELIKDLISSLQELGQAVELPEMPEMPLDSDWLIFVNEVEGVAEQMPTEVSEVVAWKTKCKNVAVLGREMTTLAAYISQLQYDIKMQNMLQRIARKQADRLSAIQLPDLKNYAELVTQMDMRTTRLLVALIKVVYIQNAALMYQYLSEPTPVYAWPVNMDTVWRMLVQHEQFAVQGLMRLGPAFDIVRTYVVKSIPVSLLLEGDDYEFEILAEDHITFPLSLSRVRIHHLEMKFVQGGADVHMPITDTGSIYILLQGSRSFHDRNESAIIHYEAATSLDYHFAYRLDTGETTVTNLPSAEFVQTFMRMTPFSNWRLRLSASAEENKGLAFPTATSADATSHVAVTFFISAIRQVSL

SEQ ID NO: 886 - protein, 845 aa, Onoclea sensibilis
MGNVMTGPSYEEIYKNANYIHRSVATPICSEVMSVSRMYLALSELDVQRLKNPEIVKELYVFADVIFWDVFPTWPGLEAVFILCRVLVVDTRHLVAPSASSDGAEAAAADASVSIRAPWLNAPSTTFLISRREQIMPPFSCSIRAKHSTTRASTAPAAFCLQTEQVIDTSFSTNSAVSDNIVLKLETREGSSADDETVDDHIRESFPEVTLSWADVNLTLLWAMEATVLVAELISTYMSSSTRTVKEATLHLKWVNQLLIHALETKDGAPDAAVERLFNTLVLQVQLLLNNPSLVAGIVVPRLQYSTYRNLISTMAHMADGYTREFQQLIMFMEQNEVLGTFLLEQNQAFAAKERDMESFHAELHKVKTNDLIQALATLEQLEVLMTEMNAEMEQAQQDMEEGLRRFRNRQVARAVFSVFRSIVAIASSFFTGGATAGAAVQSTKNAVDQVVEMKSSLERIVETLEKLLLVSDFLVAMKELINAVQDVHGVAANVPTLPDMPTEAEWTIFENEIEAVAAEMPEEVSEVLVWKTKCKNMAAIGREMVTMATVISQLQYDVRMHDLLQEISRNQAERLEAIKPVDIRNYQEMATQLEMRTTHILLGLLEVLSLQNAAIQYQYLMPPSPVIMNNTIITMSDVWTQLLQQEAAAVVALSDLGFPTDRKVTYVVEGIPVGVLLDGQDWDFSISTEDVDHFPFGWSRVRIAYVEMKFVSARLGRSTEPAGNEDQIHEPITDTGEVYMILRGEQTFADRKRGEKVKYEAVAPVKYQYAYHVETGEMTEHNRPTEEFANHFMRMTPFTRWKLRMSGSARENRGLAFPTATAMDATTQIAIHFHVTAIRAADWH

SEQ ID NO: 887 - protein, 885 aa, Thelypteris noveboracensis
MEYSVLYGNVNQVSLRFEKTEFSEVVVVHRMHVRLAELNVTLGDTLLQGSDRVKRLYVLADVVEVPPNFSTWMSLPGTVSVVILCRILYFPYLEDASFASGWVVHAPLLRLRVVQTSTDFAQVFAIPENDSSAAAVADIGLYIHADRIIYRDDPARNIPVIEVQVRGNSTFSPYLPGFPDTGVKLSTVQCVREFSKGQPLAPEDSDLQRSDEIELIAPSGSEQRRLTAAFGDSTVVGVSLLFDPSTSFDFLSLGPSQINVPAAILSDPNIILGMQMNMLIAELVLAAHNSPQLIKAVTRHVEWLNKMLVQLASPNDDILGLLFRVQAYKKMAKQPHPVVPQLRYRMYQDFINRMVQIAQSYDGDLKQLKLFIAQNEILGSYLLEQNKAFAAKEKSMSAFHDQVVSLRKSELVNAIDKMNRLSYQMDVEREAMDQAQKDMEQGLEEYEKRQIVNAFFAVITAISLAALGFVTGGATVAGAVAAAGQAVNAVASLAATLQKVMGILQIIQQVVETVAAIREVIELFDNMGQLVAAPEMPEMPSNADWLIFVNEVEAMAEQLPVEVDARIVWKTKSKNVAVLGQEMCTIGTHIAELQYQIKVEEMLQKIAETQAERLEGISPADLSSYMEMVSQIDMRTTRLLLQLIRVLHIQNAALKYEYLYAADEQLDSWPVTMDTVWTMLLQQESASLSGLLSLGPANDDTRTYVVKDIPVEVLLSGGDWPFVIPVDDYTVFPAGWFYVRIRHVELKFEQQAGSDQNDIVIHQPSTNTGKLYMLLQSSRFFQDRNQAGVVMDYETSTGLSYPYAYNLNTGETTHQNVPSSEYAFTYMQMTPFTTWRLRLSAAAEENEGLVFHPPPTSPTSTTQISITFHVSRIRRIEYTLAGDVE

SEQ ID NO: 888 - protein, 896 aa, Thelypteris noveboracensis
MAAADDWSEVYRDLNQVSDRIRLDQLEFSEVMVIHRMHIKMSELDLGHLEGAEKVKHLYVFADVVEYDSLDAGLPGSIVRLPGSISVVIMCRVWHVSSLLIARPDLNNPQYVRSQDGVKLQLVHMKLYLNLVTNSMHRLDPQTLQEVPEPCLCVYAHVLRVAFRPDAGDSWDPALLFPAEYVLSTLEALIYDNDTPEHLLFNNSTFSRVWASRFQAIFRFINRDGLQIGSLPPGTIVTLNRDEPSLFSNAYRVNSTSLLNWTTISDVDWLAPAFSILRQRDIPVAVLTDPNILPAMQTSMLIGELVELGHPSAATIEVVDKHVKWLSNLWLQVIEEKKGKDVEEYLELLFRAQYVIKKVGRIRGLVVPQLQYDAYSNLINRMAQVAESYDQSLRQFRLFIQQNKILGRFLLEQNQAFAEKEKDMDIFYSELITQRQIELDNTLQKMKRLGSQMETQTAYMEQAQEDMEEGIRKFQNEQVARAIFGVIGVIAAVGLAFLTGGATAPAALGAARNAVTLAGTVAQTLQKVLDILEGLQAVMEIVAVINELVSSLQDLGQLLDLPEMPEMPMESDWLIFVNEVEAVAEQMPTEVSETIAWKTKCKNVAVLGREMITSATYISQLQYDIKVQSMLQQIAKKQADRLSNIQLPDLTNYTEMITQMDMRTTRMLVALIKVVYIQNAALMYQYLSEPTPVNAWPVNMETVWRMLVQHEQLAVQGLMRLGPAYDIVRTYVVEGIPVSLLLDGDDWEFEIPAEDRITFPLSLSRVRIHHLEMKFVQGANVHMPITDTGSIYILLQGSRNFHDRNEGEIIHYEAATSLEYHYAYRLDTGETTVTNLPSAEFVKTFMRMTPFTNWRLRVSASAEENKGLAFPLATSADATTQIAITFFISAIRQISL

SEQ ID NO: 889 - DNA, 2661 bp, Aglaomorpha Roberts
  source 1..2661: mol_type = other DNA
atggagtatagcagcttgtatggtgatgtgaaccaagtgagcctgaggttccagaacacggaattctcagaggtcatggtggtgcatcggatgcatgtgcgcctggaggagcttgacatgacgggggtcgagggcatcgagaaggtcaaacgcctgtacgtgctggcggacgtggtggagctgccttccgtagcaacccaggtgtttcagtatctgcgccttcctgcgtccatttcagcgattatcctctgccgcgttctctatatccctgaagttgatcagagggccggcatggctcaatgctcgctcgacttcccgtttatgcgcctccatgttgtcgcctctgcacacgagaatggtggaggtgttatgcaagccttttcctcggacgccacccccagcaatattggcatctacctccatgctgaccgcttcatctaccgccaggccacatctccggccagcaactttgtcttgcccctggaggtgagggtcagctttggcagctctaccctctccggcacaaccatccgtcccgactggcaaaaccttaatgtctccaacatcagctacgggccgcagcacctgtccaggggcgcacccctcacatcctcagactctgacttgcagagatctgacgagatcgagctcctggcagagcaagataattggagccctcttttacacgttgcgttcaacccgaatgcaccacctggcaacatcccgggtacacaaggaatattccagccctcctctgcatgcagcttcttccatgtgccgccaccgaatgtccctgcgaacgtgctcaccgatccttccatcatcttgggcatgcaaatgaacatgctcattgccgagcttgtcttggctgctcacaattcgccgcaagtcatgaacgtcatcactaagcatgtactatggctcaataagatcttgcttcaggttgcttcacccaatgatgatattttagcactcttgtttcgtatccaagcattcatgaagatggcaaagcagccgcggtttgtggttccacggttgcagtaccacatgtatggcagccttatcaatcgaatggtgcaagtagcccagaattatgaccaggagttcaagcaactcaagcttttcattgcacaaaacgagattttgggaagctatttgctacaacaaaatagggcttttgcagaaagggagagggaaatgagtgcttttcactcgcaagttgtgtcgatgaggagatccgagcttcagtctgccatagaaacaatggacaatttgagtttgcaaatgcaatcagagagtgaagcgatgaacgaagcccaggaggacatggttgaagcaattcaagaatatgaaaggaaattacttgcaagagctctattttctgtgattggggcaatagcaagcattgctcttgcatttgccactggtggtgcaactgcaccaggggcagtggcagcagccggaggggctgtcgctgcagcagggaggttggccgaagggctccaaagggttgtggacatcctacaaggcttgcaagcggtcatggaggttgtggtagccataagagacatcgtagaatcattgaaaaacatgggtcaactagtagaagctcctgagatgccagagatgccgacagatgcggactggttaatttttgtaaatgaggtggaggcagtggcagagcaagtgccaacagaagtggcagaggtcccagtgtggaaggctaagtgcaagaatgtggctgtgctagggcaagcgatgtgcaccacagcagcatatattagtgagctacagtatcagataacggtggaagagatgctacaagagattgcacaacgccaagcagacaggttagtggggatatcagcagcagatctatcgagctacacagagatggcatcacaaatagacatgcgtacaacccgaatcctccttgagctcatcaagatgttgtacattcagaatgcagcaattaagtatgagtacttgtatgatgctaatgagaagcttaactcatggccagtgagcatggagactgtatggaccatgctcttgcaacaagagaatgcagctctcttgggcttgctagacttggggcccaccaatgatttcacagtaacctatgctgttaaagacatacctaccaagttgttagtagatgggtttgattggaattttgagatcgcggtggaggattttgcgatctttccatcaggatggtctcgtgttcgcatacgatatgtcgagcttaaatttgaccaacaaggtgctgatagtagtaacattgtcatacaccagcctagcactaacactggcttagtctacatgctcttacaaggctctcgtttcgtccatgaccgcaaacgtgaggaggtgatggactatgaggcaagcatgggacctgtatatgcatatgcctatgacctcaacactggtgcaaccactctcaacaacatcccctcacagcaatatgccaacacatttatgcaaatgacacccttcaatgcttggagacttcgcctctctgcctctgctatggaaaatcagggattggtgtttcctacagccacttctcctgacaatactacccagatttccatcacattctatgtcactgctattcgacgcatagatcatcgacaagagggagatgtggagtaa

SEQ ID NO: 890 - DNA, 2664 bp, Humata termanii
  source 1..2664: mol_type = other DNA
atggagtatagcagcttgtatggtgatttgaaccaagtgagcctgaggttccagaacacggagttatctgaggtgatggtggtgcatcggatgcatgtgcggctggaggagcttgacatgacgggggtggagggcatcgagaaggtgaaacgcctgtacgtgctggcggacgtggtggagctgcctcccatagccaccacgacgtttgagtatctgcgcattcccgctaccacttcagcgattatcctttgccgcgttctctatattcctcaagttgatcagaggaacccccacttggacgctcaatgctcgctcgacttcccgtttatgcgcctccatgtcgttggatctgcacacccgaatggcgggggtgttatgcaagccttttcctccgacgccaccgccagcgatattggcatctacctccatgctgaccgcttcatctaccgccaggccacatctccggccagcaactttgtcttgcccctggatgtaaggctcaactttggcagctctaccttctcctcagacgtccgtcccgactggcaaaaccttaatgtctccaacatcagctacgggccacagcacctgtccaggggcacacccctcacatcctcagagtccgacttgcagagaactgacgagatcgagctcctggccctgccagatgtttggagccctcttctacacgtcgcgtttagcccgaatgcaccacctggcaacattccaggtacgcaaggacaattccaaccctcctctgcatgcagcttcttccatgtgccgccacctgatgtccctgctaaagtgctcactgatccttccatcatcttgggcatccaaatgaacatgctcattgctgagcttgtcgtggctgctcacaattcgccgcaagtcatgaacgccatcactaagcatgtgctatggctaaacaagatcttgcttcaggttgcttcccccaatgatgatattttagcgctcttgtttcgtatccaagcattcatgaagatggcaaaggaaccgcggtttgtggttccacggttgcagtaccacatgtacggtagccttatcaatcgaatggtgcaagtagcccagaattatgaccaggagttcaagcaactcaagcttttcattgcacaaaatgagattttgggaaggtatttgctacaacaaaacagagcttttgcagaaagggagagagaaatgagtgcttttcactcgcaagtcgtgtcgatgaggagatctgagcttaggtctgccatagaatcaatggacaccttgagtttgcaaatggaagcagagagtgaggcgatgaacgaagcccaggagagcatggtggaagcaattcaagaatatgaaaggagattacttgcaagagctctattttctgtgattgcggcaatagcaagcgttgctcttgcatttgccactggtggtgcaactgcgccaggggcagtggcagcagccggaggggccgtctctgcagcagggaggctggcagaagggctccaaagggtcgtggacatcctacaaggcttgcaagcggtcatggaagttgtggtagccataagagacatcgtcgactcattgcaaaatatgggtcaactagtcgacgcgcccgagatgccagagatgccaacagatgcggattggttaattttcgtaaatgaggtggaggcagtggcagagcaaattccaacagaagtggcagaggtcccagtgtggaaggctaagtgcaagaatgtggccgtgctagggcaagcgatgtgcaccacagcagcatatattagtgagctacagtatcagataacggtggaggagatgctacaagcgatcgcgcagcgccaagcagacaggttagtggggatatcagcagcagatctatcgagctacacagagatggcatcacaaatggacatgcgtacaactcgaatcctcctcgagctcatcaagatgttgtacattcaaaatgcagcaattaagtatgagtacttgtatcctgctaatgagaggcttgattcatggccagtgagcatggagactgtatggaccatcctcttgcaacaagagagtgcagctctcttgggcttgctagacttggggccctccaatgatttcacagtaacctatgctgttaaagacatacctaccaagttgttagtagatggttttgattggaatttcgagatcgcggtggaggattttgcaatctttccatcaggattgtctcgcgttcgcatacgatatgtcgagcttaaatttgaccaacaaggtgctgatagtagtaacattgtcatccaccagcctagcactaacactggcctagtctacctgctcttacaaggctctcgtttcatccatgaccgcaaacgtgaggaggtgatggactatgaggcaagcataggagctgtatatgcatatgcctatgacctcaacactggtgcaaccactctccccaacatcccctcacaggatcaggccaacacattcatgcaaatgacacccttcaatggttggagacttcgcctctctgcctctgcgatggaaaatcagggattggtgtttcctacagccacttctcctgacaatactacccaaattaccatcacattctatgtcactgctattcgacgcatagatcatcgacaagagggtgatgtggagtga

SEQ ID NO: 891 - DNA, 2637 bp, Pellaea rotundifolia
  source 1..2637: mol_type = other DNA
atggagtatggcagcttgtatggtgatgtgaaccaggtgagcctgaggttcgagaagacggaggtctctgaggtgatggtggtgcatcggatgcatgtgcggctggaggagctggacatgagcagcgacaagctcaaacgcctgtacgtgctggcggacgtggtggagctgccttcccagcgtcaaactatcgttattcccgccaccgtttcggcgataatcatgtgccgcgttctctacatcccttacatctggaccgtggtcgacaactgcaccctcgtcctcccgcacatgcgtttccgggttgtcgaaacaagcaatatcgcgcccagaactggccaattctttgccttacccccctctgacgccgccgtcgacaacgacgtcggcagctttggcggcctctacatccatgccgaccgcttcatctaccgccaggccacatcgtttacttccgactgggtccagcctctgggtctccgggtacgaggaagctccaccttctcctcaaccttccgtcctgactggccagaaaccctacctgtcaacaacctcaatcaaaccatcaccctctccttgggctcattcctcacaccctccgactctgacttgcagagatctgacgagattgagttcctgcagacggagccccagagagtgcaagtggtagttgaccggggacctggcagtcagacaggtctggtcttactcgtcgaaaactcccctgaaatcagcgttttccctgcgccatcgctggaacatgtccctgcagacgtcctcgccgatccttccatcatcttgggcatgcaaatgaacatgctcagtgccgagcttgtcttggctgctcacaattcgcagcaagtcatcaaagctgtcagtaagcatgtggaatggctcaacaagatcttgcttcaggttgcttcaccgagtgatgacattttagcgctcttgtttcgtgtgcaagcattcattaagatggcaaagcaatcgcgttttgtggttccacggttacaataccatgcgtacagtaaccttatcaatcggatggtgcaagtagcccaggtttatgaccaggagttaaggcaactcaggcttttcattgcacaaaatgagatcttgggaagctatttgctacagcaaaataaggcatttgcagagaaggagaaggacatgagtgctttccactcgcaagtcgtgtctatgaggagatctgagctgagctctaccatagaaatgatgggcaggctgagctcgcaaatggaaacggagagtgaggcgatggacgaagcctcggacagtatggttgcagcaatccaagaatacgaaaggaaacaacttgcaagggctctatttgcagtgcttggggcaatagcaagtgttgctcttgcatttgccactggaggtgcaactgcaccaggggcagtggcatcagctggagcggcagtcactgcagcaggtagattggcagaaggcctccgaagggtggtggagatcctcgaaggcttgcaagcggtcatggaggttgtggcagccataagagatctcgtagaatcactggaaaacatgggtcaactagtagaagctcctgaaatgccagagatgcctacaaatgcagactggttgatttttgtaaatgaggtggaggcagtggcagagcaagtgcctgaagaagtgtcagaggtaccagtgtggaaggccaagtgcaagaatgtggcggtgctagggcaagagatgtgcaccacagcggcacatattagcgagctacagtatcagataagggtggaagagatgctacaggagattgcacaacgtcaagcagacaggctaatggggatatcagcagcagatctatcaagctacacggagatggcaacacagatagacatgcgtacaactcggatgctccttcagctcatcaagatgttgtacattcagaatgcagcaatcaagtacgagtacttgtaccctgcaagtgagcggcttaactcatggccagtgacgatgccgacagtatggaccatgctcttgcaacaagagaatgcagctctcttgggcttgctagacttggggccctctaatgatttcacagtaacacatgttgttaaagacatacctgtcaagttgttagttgatggttacgattggcattttgagatccctgtggaggattccgcaatcttcccggcaggatggtctcgtgttcgcatacgctatgtcgagcttaaatttgacaaacagggtactgacagtaacattgtcatccaccagcctagcactaatactggcgaaatctacatgctcttacaaagctctcgtttcctcagtgatcgcaaacgggaggaggtgatggactatgaggcaagcacgggactcgcatatgcgtatgcctatgacctcagcactggtgcaaccactctaactaacatcccctcagaggcacatgccaacacatttatgcaaatggcacccttcactgcctggaggcttcgtctctctgcctctgctatggaaaatcagggactggtgtttcctacagccacgtctccggacaatactacccaaatctccatcacattctatgtcactgctattcgacggatagatactcgtcgacaacgagctgatgcggagttatag

SEQ ID NO: 892 - DNA, 2682 bp, Adiantum hispidulum
  source 1..2682: mol_type = other DNA
atggagtatagcagcttgtatggtgatgtgaaccaggtgagcctgaggttcgagaagacggaggtctctgaggtgatggtggtgcatcggatgcatgtgcggctggaggagctggacatgagcagcgacaagctcaaacgcctgtacgtgctggcggacgtggtggagctgccttcccagcgttcaactatcgttgtccccgccaccgtttcggcgataatcatctgccgcgttctctacatcccttacatctttacggtcctcgaaaactgctccttcttcctctcgctcatgcgcttccgggtcgtcgaaacccgcatcgagccgcccaggactggccaattctttgccttaccctccgctgacgccgttgacgacggcgtcggtggctttcgcggcctctacattcttgccgaccggttcatctaccgccaggccacatcgtttacctccgactgggtgcagcctttgagtctccgggtacaaggcagctccaccttctcctcaaccttccgtcctgagtggccagaaaccctacctgtcaccaacctcaatcacaccgtcaccctctccttgggctcattcctcacaccctccgactctgacttgcagagatctgacgagattgagttcctgccgacggagccccagagagtgcaagtggtaattaaccggggacctggcagccagacgggtctggtcttaatccccgaaaactcccctgaaatcagcgttttccctgcgccatcgctggaacatgtccctgcagacgtcctcgccgatccttccatcatcttgggcatgcaaatgaacatgctcagtgccgagcttgtcttggctgctcacaattcgcagcaagtcatcaaagctgtcactaagcatgtggaatggctcaacaagatcttgcttcaggttgcttcaccgagtgatgacattttagctctcttgtttcgtgcgcaagcattcatcaagatggcaaagcaatcgcgttttgtggttccacggttacaataccatgtgtaccgtaaccttatcaatcgtatggtgcaagtagcccaggattatgaccaggagctcaggcaactcaggcttttcattgcacaaaatgagatcttgggaagctatttgctacagcaaaataaggcttttgcagagaaggagaaggacatgagtgatttccacttgcaagttgtgtctatgaggagatccgagctgagctctaccatagaaatgatgggcaggctgagcttgcaaatggaaacggagagtgaggcgatgagcgaagcccaggaaagtatggttgaagcaattcaagaatacgaaaggaaacaacttgcaagggctctatttgcagtgattggggcaatagcaagtgttgctcttgcatttgccacggcaggtgcaactgcaccaggggcagtggcagcagctggagcggcagtcactgccgcaggtagattggcagcaggcctgcagaaggtcgtggagatcctcgaaggcttgcaaaaggtcatggaggttgtggcagccataagagatctcgtagaatcactggaaaacatgggtcaactattagaagctcctgaaatgccagagatgcctacaaatgcagactggttaatttttgtaaatgaggtggagctagtggcagagcaagtgccagaagaagtgtcagaggtcccagtgtggaaggccaagtgcaagaatgtggcggtgctagggcaagagatgtgcaccacagcaacacatattagcgagctacagtatcagataagggtggaagagatgctacaggagattgcacaacgtcaagcagacaggctaatggggatatcagcagcagatctatcgagctacacggagatggcaacacagatagacatgcgttcaactcggatgctccttcagctcgtcaaggtgttgtacattcagaatgcagcaatcaagttcgagtacttgtaccctgcgagtgagcggcttaactcatggccagtgaccatgcccacagtatggaccatgctcttgcaacaagagaatgcagctatcttgggcttgctagacttggggccctctaataatttcacagtaacacatgttgttaaagacatacctgtcaagttgttagttgatggttacgattggcattttgagatccctgtggaggattccgcaaccttcccggcaggatggtctcgtgttcgcatacgctatgtcgagcttaaatttgacaaacagggtactgacagtaacattgccatccaccagcctagcactaatagtggcctaatctacatgctcttacaaagctctcgtttcctcagtgatcgcagacgggaggaggtgatggactatgaggcaagcatgggactcgcgtatgcgtacgcctatgacctcagcactggcgcaaccactctaactaacatcccctcagaggcacatgtcaacacatttatgcaaatgacacccttcactgcctggaggcttcgtctctctgcctctgctatggaaaatcagggactggtgtttcctacagccacttctccggacaatactacccaaatctccatcacattctatgtcactgctattcgacggatagagactcgtcgacaacaagctgatgcggaggggggcgagggagacagactcgaggggggtgtggggtttgggcaacccagctaa

SEQ ID NO: 893 - DNA, 2559 bp, Adiantum polyphyllum Amaretto
  source 1..2559: mol_type = other DNA
atggattacagcactctttacacggatctgaaccagataagcatgcccctggatcgggtagagttctcagaggtgatggtaattcacaggatgtacttgaggttatctgatctgaatgtgggggagctccctggagccgagagcgtgaagcggttgtatgtgtttgcagacgtggtggagctcgcaacatttgcgtatccacagttgcttcatacgcggatgccaggatcggtgacggtgatcattctgtgtcgtcttcttcagtttccaactgatgggtcgttctctgcttggctcgagctgccgttcatggagttgcacacactcatagaacaacacaagtcagagataaaagcagcagatgacgcgaaatggggaacgtatgtacacgcggaggaagtacagctcagcccgctgtttaatgggtggccttatctggttgttgaggcacagcgctgtattataaccgcggccatgcacaatacatttaaccgccctgggtgggttcgctccgttactcaatttacaactgatcagtccggtcgggtagataccacactgctcgctcgaacagaattcggccatatttatctcccactcgagacagattccccaacggcattcagtgtttcacaccgccaaagtacgaatttgcccgtagagtacaccggtattccagtagaggtggtaaccgatcctaacatcttgatgggcatgcagaccagcgtgcacattgcggagctagtgaaggcatgttacccgtcaccagaattagtgagcgctgtaggggtgcacgtgaattggctcaacgaagtcttgctccgagttgtccagaacgaatctcagttgcaagggaccgaggcctacaacgagtgccttgcgcttttgggtcgcattcaatgtgtcatgaagatggggccgtttgtctcggtagtgccgcagctgcaatacagaatgtatggtagcctcatcagacaaatggcccaggtagcacagaactacgaccaagatttcaggcagctcaagttattcattgcccaaaaccaaatccttggcagctatttgctgcagcagaacaaggcatttgctgacagagaggtgcagatggagggctttcattcagcggtcatttctcaaagaaggcaggagttggacgacgccatcgctaagatggaccgactgagcttgcagatggaggaagaggacagagcaatggagcaagcccgaaaagaaatggaagaaggattgaagcagttccagaatgagcaagttgcaagggctgtgttcgctgttcttaaatctgtagctatgattgcgctcgcattcgtcacggctggtgcaacggctcctggggctgcagcatccgcagcgcaagctgtgagcatagccggtcaggccgcacaagctcttcaaagggtggtggaaattctagaggggctcgaggctgtgatggaggttgtggctgctataaaggaccttgtggatgctctggaccaggtaagtcagattgtggatgcaccacctatgccagacatgccctcggaggcggactggagtatttttgtgaatgagattgaagccgtggcagaggggatgccgacggaagtctcggaggttccggcgtggaaggccaagtgcaagaatgtggctgcactgggtagggagatgtgcatcacggcagaacagatttcccagctccagtatgacatctgggtgcaaggcttgttgcgggatatagctcaaagccacgcagaccggctggcagcgattcaacctgctaatcttaccaactatttggagatggcaacacagatggatatgcggactacgaggatactgatagggctcctaaacataatgcgcatccagaatgcggcacttatgtatgagtacctcctaacgcccacgcagctcactgcatggccgctgagaatggatactgtggccaacttgctcatcacgcaggagagtgctgcactgtcaggattagctcagttagggcccccatcggacttcacgagcaggcatgtagtgaaaggcatacctgtgagcttgcttctagacagtggggattgggaatttgagattcctgtgcaaggtggcatgtccagtttcccttccagctggactcgagtgcggattcggcacctggagatgcactttgtgcaggaggcgagcggtggcggcgagattatccaccagcctgccacccagacggggactgtttacatcctcctgcagggctccactgtctttcatgatcgcagaagggaggaggtgatgacctttcaggcagcggttccgctcaactaccattacgcgtaccgcctcgacactggagaagccactcttacgaacgagccctcggaacagtttgccaacacattcatgcagatgacaccgttcactcactggaggctacgtctgtctgcgtccgcagcggagaatgaaggattagcctttcccacagctacagctcccgactccaccactgagattgccatcactttccatgttacggccattagacaaattgactggcggcaagaggaggagtag

SEQ ID NO: 894 - DNA, 2574 bp, Adiantum polyphyllum Amaretto
  source 1..2574: mol_type = other DNA
atggccactgtggactacagcaccctctaccgcgacctcaaccagatctccatgcccctggaccgcgtcgagttcagcgaggtcatggtcatccaccgcatgtacctcaggctctccgacctcaacgtcggcgaactcccaggagctgagcgcgtcaagcgcctgtacgtcctggcagacgtcgtcgagctggcaaccttcgctcaccctcagctgctgaacacccgcatgccaggtagcgtgaccgtcatcatcctctgccgcctgctccagttcccaaccgacggctccttcgcagcatggctggagctcccgttcatggagctgcacaccctcatcgagcagtaccgctccgagatcaaggctgccgacgacgccaagtggggtacctacgtccacgcagaggaggtccagctcagcccgctgttcaacggctggccgtacctggtggtcgaagcgcagaggtgcatcatcaccgccgccatgcacaacaccttcaaccggccaggctgggtccgctccatcacgcagttcaccaccgaccagagcggcagagtcgacaccacactcctcgctaggaccgagttcgggcacatcgacctcccactcgagactgactcaccgaccgccttcagcgtctctcaccgccagtccaccaacctcccagtcgagtacaccggcatccccgtcgaggtggtcaccgacccgaacatcctcatgggcatgcagaccagcgtccacatcgcagagctcgtcaaggcctgctacccttcacccgagctggtgtcagcagtcggagtccacgtcaactggctcaacgaggtcctccttcgcgtcgtccagaaggagtcgcagctccaagggaccgaggcctacaacgagtgcctcgcactcctcggacgcatccagtgcgtcatgaagatgggcccgttcgtcagcgtcgtgccacagctccagtaccgcatgtacggcagcctgatccgccagatggcacaggtcgcccagaactacgaccaggacttccgccagctcaagctcttcatcgcccagaaccagatcctcggctcgtacctcctgcagcagaacaaggccttcgccgacagggaggtccagatggagtccttccacagcgccgtcatctcgcagaggaggcaggagctcgacgacgcgatcgccaagatggaccggctcagcctgcagatggaggaggaggaccgggctatggagcaggctcgcaaggagatggaggagggcctcaagcagttccagaacgagcaggtcgccagagcagtcttcgccgtgctcaagtccgtcgcgatgatcgccctcgccttcgtcacagctggagccacagctcctggtgcagcagcatccgcagctcaggcggtcaacatcgctggtcaggcagcgcaagctctccgcagagtggtcgagatcctcgagggcctcgaagccgtcatggaggtcgtcgccgcgatcaagcacctcgtggacgcactggaccaagtcagccagatcgtggacgcaccaccgatgcccgacatgcccagcgaagcggactggagcatcttcgtgaacgagatcgaggcggtcgccgaaggcatgcctaccgaggtcagcgaggtgccagcctggaaggcgaagtgcaagaacgtcgccgcactcggacgcgagatgtgcatcacggccgagcagatctctcagctccagtacgacatctgggtgcaagggctcctgcgcgacatcgctcagtcgcacgccgatcgccttgctgccatccagcctgcgaacctgaccaactacctcgagatggccatccagatggacatgcgcaccacgcgcatcctcatcgggctcctcaacatcatgcgcatccagaacgccgccctcatgtacgagtacctcctcacgcccacccagctcacagcatggccactccgcatggacaccgttgccaacctcctcatcacgcacgagagcgctgcactcagcggactcgctcagcttggaccaccgagcgacttcacctcgaggcacgtcgtcaagggcatccctgtcagcctgctcctggacggaggagactgggagttcgagatccccgttcaaggcggcatgtcctcgttcccgtccagctggaccagagtccgcatccgccacctcgagatgcacttcgtgcaggaggccagcggaggtggtgagatcatccaccagcccgcaacgcagaccggcaccgtctacatcctgctccaaggctccaccgtcttccacgaccggaggcgcgaggaggtcatgaccttccaagccgcagtcccgctcaactaccactacgcctaccgcctggacacaggtgaggctaccctgacgaacgagccgtccgagcagttcgccaacaccttcatgcagatgacgcccttcacccactggaggctcaggctctccgcatccgcagctgagaacaagggcctcgcctttccgaccgctacagcacccgactccacgaccgagatcgccatcacgttccacgtcaccgccatacgccagatcgactggaggcaggaggaagaggaggagtag

SEQ ID NO: 895 - DNA, 2577 bp, Adiantum polyphyllum Amaretto
  source 1..2577: mol_type = other DNA
atggccactgtggactacagcaccctctaccgcgacctcaaccagatctccatgcccctggaccgcgtcgagttcagcgaggtcatggtcatccaccgcatgtacctcaggctctccgacctcaacgtcggcgaactcccaggagctgagcgcgtcaagcgcctgtacgtcctggcagacgtcgtcgagctggcaaccttcgctcaccctcagctgctgaacacccgcatgccaggtagcgtgaccgtcatcatcctctgccgcctgctccagttcccaaccgacggctccttcgcagcatggctggagctcccgttcatggagctgcacaccctcatcgagcagtaccgctccgagatcaaggctgccgacgacgccaagtggggtacctacgtccacgcagaggaggtccagctcagcccgctgttcaacggctggccgtacctggtggtcgaagcgcagaggtgcatcatcaccgccgccatgcacaacaccttcaaccggccaggctgggtccgctccatcacgcagttcaccaccgaccagagcggcagagtcgacaccacactcctcgctaggaccgagttcgggcacatcgacctcccactcgagactgactcaccgaccgccttcagcgtctctcaccgccagtccaccaacctcccagtcgagtacaccggcatccccgtcgaggtggtcaccgacccgaacatcctcatgggcatgcagaccagcgtccacatcgcagagctcgtcaaggcctgctacccttcacccgagctggtgtcagcagtcggagtccacgtcaactggctcaacgaggtcctccttcgcgtcgtccagaaggagtcgcagctccaagggaccgaggcctacaacgagtgcctcgcactcctcggacgcatccagtgcgtcatgaagatgggcccgttcgtcagcgtcgtgccacagctccagtaccgcatgtacggcagcctgatccgccagatggcacaggtcgcccagaactacgaccaggacttccgccagctcaagctcttcatcgcccagaaccagatcctcggctcgtacctcctgcagcagaacaaggccttcgccgacagggaggtccagatggagtccttccacagcgccgtcatctcgcagaggaggcaggagctcgacgacgcgatcgccaagatggaccggctcagcctgcagatggaggaggaggaccgggctatggagcaggctcgcaaggagatggaggagggcctcaagcagttccagaacgagcaggtcgccagagcagtcttcgccgtgctcaagtccgtcgcgatgatcgccctcgccttcgtcacagctggagccacagctcctggtgcagcagcatccgcagctcaggcggtcaacatcgctggtcaggcagcgcaagctctccgcagagtggtcgagatcctcgagggcctcgaagccgtcatggaggtcgtcgccgcgatcaagcacctcgtggacgcactggaccaagtcagccagatcgtggacgcaccaccgatgcccgacatgcccagcgaagcggactggagcatcttcgtgaacgagatcgaggcggtcgccgaaggcatgcctaccgaggtcagcgaggtgccagcctggaaggcgaagtgcaagaacgtcgccgcactcggacgcgagatgtgcatcacggccgagcagatctctcagctccagtacgacatctgggtgcaagggctcctgcgcgacatcgctcagtcgcacgccgatcgccttgctgccatccagcctgcgaacctgaccaactacctcgagatggccatccagatggacatgcgcaccacgcgcatcctcatcgggctcctcaacatcatgcgcatccagaacgccgccctcatgtacgagtacctcctcacgcccacccagctcacagcatggccactccgcatggacaccgttgccaacctcctcatcacgcaggagagcgctgcactcagcggactcgctcagcttggaccaccgagcgacttcacctcgaggcacgtcgtcaagggcatccctgtcagcctgctcctggacggaggagactgggagttcgagatccccgttcaaggcggcatgtcctcgttcccgtccagctggaccagagtccgcatccgccacctcgagatgcacttcgtgcaggaggccagcggaggtggtgagatcatccaccagcccgcaacgcagaccggcaccgtctacatcctgctccaaggctccaccgtcttccacgaccggaggcgcgaggaggtcatgaccttccaagccgcagtcccgctcaactaccactacgcctaccgcctggacacaggtgaggctaccctgacgaacgagccgtccgagcagttcgccaacaccttcatgcagatgacgcccttcacccactggaggctcaggctctccgcatccgcagctgagaacaagggcctcgcctttccgaccgctacagcacccgactccacgaccgagatcgccatcacgttccacgtcaccgccatacgccagatcgactggaggcagggggaggaagaggaggagtag

SEQ ID NO: 896 - DNA, 2583 bp, Adiantum polyphyllum Amaretto
  source 1..2583: mol_type = other DNA
atggccactgtggactacagcctgctttacagggacctgaaccagataagcatggctgtggataaggtagagttctcagaggtgatggcgatccacaggatgtatgtgaatttagctgacctggatgtgggggagctcgtgggagctgagacagtgaagcggttgtatgtgtttgcggatgtggtggagcttgcaccgcggcagcttccaccgggggatcagacgcgaatgccaggatcggtgacggtgatcatattgtgtcgtcttcttcattttccaactggtgagctgccagtaccagcatttctccacctgtctttcatgaagctccatgctatacagagagagcacgatatgtcagagatagcagcagcagatgggatgaactggggagtgtacatttacggggaggaagtacaactcacgggtccttttagcggttatttactttccgtgaggacagatcgcgctattataacctcagccattcacaatttgatcgagcaacctgggagagtaacttccagtattaatattacatggggacaattcgaacccaacactacgagtatgttagcaacaccggccggctggccctctggccaattttttcatctttggggggtttccccttcggcattccttgttttacccagcataagtacgaatgtatccttcacaagtattccagtagaggtggtgactgatccgaacatcttgctgggcatgcagacaacagtgcagattgcggagctagtcaaggcaggtcacccatcacccgacattgtgagcgcggtagcgaagcacgcgatttggctcaacaaactcttgctccaagttgtgcagaacgaaactcacttgcgagggaccgagtcctacaacgagtgcctggcacttttgggccgtgctcaatttgtgatcaagatggggagatatggcttagtagtgcctcagctgcaatacaaaatgtacggcagcctcatcaagcaaatggcccaagtagcacagaactacgaccaagatttcaagcgattcaagttatttattatacaaaatcaaatccttggcagctatttgctagagcagaacaaggcatttgctgacagggagctgcagatggagggcttccattcagccgtgatttctcaaagaaaaggcgagctgaacactgccttcgaaaagatggatcgactgagcttgcaaatggaggacgagaatgccgcaatggagcaagcccaaaaggacatggaggaaggattaaggcagttccagaataggcaagttgcaagagccctctttgctgttcttaaagctgtagctctgattgggcttgcattcgtaacggctggtgcaacggctcccggagctgtggcgtccgcggggcaagctgtgagcatagcaggtcaggccgcccaaggtctgcgaagggtggtggaaatcctagagcagctggaagctgtgatggaggttgtggctgctgtgaaggaccttgtgaattcattggaacaggtaggtcagttggtgcaggcaccggagatgccggacatgccctcggaagcggactggtccatttttgtgaatgaaatcgagcttgtggcggaggggatgccgacggaagtgtcagaggttccagcatggaaggccaagtgcaagaatgtggctgcactgggtcgggagatgagcatcaccgcagtacagatttctgagctccagtatgacatctgggtgcaaggcatgatgcgggatatcgcccaaagccaggcagacaggctggctgcgattcgacccgtggaccttaccaactttctggagatggcaacacagatggatatgcggactacaaggatggtgttagggctcgtcaacatgctccgcatccagaatgcggcgctcatgtacgagtatcttcttacgcccacagagctcagagcatggccgctgggtatggataccgtgagcaacttgctcattgcgcaggagaatgctgcactgttaggattaactcagctagggccctcatctgatttcacaagcacgcatgtggtgaaaggcatacctgtgagcttgctactggatggtgaggattgggagtttgagatccctgtgcaagctgacatgtccagcttcccttcaagctggactcgcgtccgaatacggcacttggagatgcactttgtggcgcaggagatgaacggtgcaagcggaggcgagattattcaccagcctgctactcagactgggactgtctacatcctcctggagggctccactaccttccatgaccgcagaagagacgaggtgatgacctttcaggcagcagctccgctcagctaccagtatgcgtaccgcctcgacactggtgaaaccactctttcaaaccagccctcggaacacttcgctaacacgttcatgcagatgacacccttcactcgctggaggcttcgtctctctgcatccgccttcgagaatgcaggattagcctttcccacagctacagctctcgactccactacccagattgccatcactttctatgttacggccattagacaaattgaccggcggcacgagctggaggagtag

SEQ ID NO: 897 - DNA, 2553 bp, Asplenium nidus var plicatum
  source 1..2553: mol_type = other DNA
atggcctccttcccggactacagggagatttacaagaacgtgaatcaagtgactcgagcggtggccagccggcagggctcggaggtgatgagcattcacaggatgtatttcaagctggacgagttggaggtggagcggctcactgaagcggacacggtgaaggagctggtcgtgttcgcagacgtggtaggaatcgaaggacaacaggtaaagcttccagcctcacgtacagttaccattgtatgccacatccttcatgtgaagcaggaggccgtgaagttgcgattcgactctttcgggcctgttgactgcgatagagggtggcttcctggtataggggaggctgcgcttatactgagcaacagccctcaggttcgattgtccatctacgcgcaacaagttgtgtgcaataccactagagcagtggtgcaggttgcacatccagtgactgtaagccaaacagtgtctccacataacccaagccgatatgccatccccggcaccatgaaatggcaggtcgagatcgcttcagatcagcccgacctctctgctgctgaacgctcatatgaactccgaacagaacgcttttgggatgtgatggagaaggtctggcgcattgaccagcaggaatggtctctcttcacacacctgctgcagggtccagtctcaatccccccagcaatcttgggggattccaatattatccttggcatgcaatccaccttgctcattgcagaactagtcctcagctaccaaacacgtgcagatgacactgtctctgctgcaaacgcgcatcttcaatggctcatcacgaacttgctccaggtgctggacgataattccctagacaaggagaccagggagcagcttcttgcactgcaggcacgggcagagttggcctcaaagctgccacttgatggaagccatactctgattgttccacgcctagagtatggccagtatcagggtctcattaagagtatggctgccgtagctgaggcatataactccgaattcatggccgtgaatctttttatacagcaaaatgagatccttggtagctacttattacagcagaacaaggcatttgctgcacgagagagggacatggatactttccatgggctagctctggcacggaaacagcaggagttgaggactgctcaggagtcgatggaagacttgaatgcccagctgacgcaacagacagaggcgatggatcaagccaaaagggacatggacgcaggtttgaagaaatacagggacgaacaagttgcaaaggcgttcttttcagttctgaaaggcgtgctagcaattggggcagccatcttcaccggtggagcagccgcggggccggcagtaaatgcgggagtggatgctgttaagggagtgagcagcctagcaggaaagctggatatggttatagacattatggagcggatggagaaggtgatggaggtcttgaacgcagtaaacgacctcgtcactgcgctttctgaaatcaataaaatggtggaggcacctgagatgccgagcgtgccgtccacgtatgagtgggatatcttcgagaatgagatggaggaagtggcagaaagcatgccgacagaggtgacagaggcacggacctggaagaccaagtgcaagaatgtggcggctgtctgcagggcgatctgcaacactgcatcctacattggccagctgcaatacgatgtctttgtgcagagcaatcaggcgttgattgcgggaaagcaggcggaacggctggaggcaattcagcctgcagaccttacaaactttctggagatggcgactcagatggatatgcgaaccagccgcatgctactgaacctactaaaggtgatgacgatacagaatgcggcactgttatttcacttcctgctgccacccgtaccattcacaggatgggtgacggtggacatggtcaggaatgccctggtgaaacatgaagccgacgccttggctgctcgggaaagactgggtccttcgacagactttgtgcagacatatgtgatgagcgacattcccatctcactcctcttggatggcgatgactggatcttcaccatcgacccagctgatggctccacgtttcctctgagctggtctcgggtgcgaatccagtacttagagatgaaattcaccggaggggaggagttccacaagcccaccaccagcagtgggagggtctacatcttgcttcaagcttcacgaaacttccaggaccggcttcacggagacgtgctgcacttcgaggcggcggtgccattgcggtatcagtatgcatatgacctgcaatccggtgaaacaactgttagtaatcggccatcacagcagcatgatggtgaatacatgcagatgacgcccttcggccagtggaggctgcgtctgtctgcctcagccgtcgaaaaccaagggcttgccttccctacagctgtggctactgatctggacagctccaccacacaaatctccatcaccttccacctgacggccgtccggagaattgatacgcgcgctcttgtagagctgtag

SEQ ID NO: 898 - DNA, 2553 bp, Asplenium nidus var plicatum
  source 1..2553: mol_type = other DNA
atggcctccttcccggactacagggagatttacaagaacgtgaatcaagtgactcgagcggtggccagccggcagggctcggaggtgatgagcattcacaggatgtatttcaagctggacgagttggaggtggagcggctcactgaagcggacacggtgaaggagctggtcgtgttcgcagacgtggtaggaatcgaaggacaacaggtaaagcttccagcctcacgtacagttaccattgtatgccacatccttcatgtgaagcaggaggccgtgaagttgcgattcgactctttcgggcctgttgactgcgatagagggtggcttcctggtataggggaggctgcgcttatactgagcaacagccctcaggttcgattgtccatctacgcgcaacaagttgtgtgcaataccactagagcagtggtgcaggttgcacatccagtgactgtaagccaaacagtgtctccacataacccaagccgatatgccatccccggcaccatgaaatggcaggtcgagatcgcttcagatcagcccgacctctctgctgctgaacgctcatatgaactccgaacagaacgcttttgggatgtgatggagaaggtctggcgcattgaccagcaggaatggtctctcttcacacacctgctgcagggtccagtctcaatccccccagcaatcttgggggattccaatattatccttggcatgcaatccaccttgctcattgcagaactagtcctcagctaccaaacacgtgcagatgacactgtctctgctgcaaacgcgcatcttcaatggctcatcacgaacttgctccaggtgctggacgataattccctagacaaggagaccagggagcagcttcttgcactgcaggcacgggcagagttggcctcaaagctgccacttgatggaagccatactctgattgttccacgcctagagtatggccagtatcagggtctcattaagagtatggctgccgtagctgaggcatataactccgaattcatggccgtgaatctttttatacagcaaaatgagatccttggtagctacttattacagcagaacaaggcatttgctgcacgagagagggacatggatactttccatgggctagctctggcacggaaacagcaggagttgaggactgctcaggagtcgatggaagacttgaatgcccagctgacgcaacagacagaggcgatggatcaagccaaaagggacatggacgcaggtttcaagaaatacagggacgaacaagttgcaaaggcgttcttttcagttctgaaaggcgtgctagcaattggggcagccatcttcaccggtggagcagccgcggggccggcagtaaatgcgggagtggatgctgttaagggagtgagcagcctagcaggaaagctggatatggttatagacattatggagcggatggagaaggtgatggaggtcttgaacgcagtaaacgacctcgtcactgcgctttctgaaatcaataaaatggtggaggcacctgagatgccgagcgtgccgtccacgtatgagtgggatatcttcgagaatgagatggaggaagtggcagaaagcatgccgacagaggtgacagaggcacggacctggaagaccaagtgcaagaatgtggcggctgtctgcagggcgatctgcaacactgcatcctacattggccagctgcaatacgatgtctttgtgcagagcaatcaggcgttgattgcgggaaagcaggcggaacggctggaggcaattcagcctgcagaccttacaaactttctggagatggcgactcagatggatatgcgaaccagccgcatgctactgaacctactaaaggtgatgacgatacagaatgcggcactgttatttcacttcctgctgccacccgtaccattcacaggatgggtgacggtggacatggtcaggaatgccctggtgaaacatgaagccgacgccttggctgctcgggaaagactgggtccttcgacagactttgtgcagacatatgtgatgagcgacattcccatctcactcctcttggatggcgatgactggatcttcaccatcgacccagctgatggctccacgtttcctctgagctggtctcgggtgcgaatccagtacttagagatgaaattcaccggaggggaggagttccacaagcccaccaccagcagtgggagggtctacatcttgcttcaagcttcacgaaacttccaggaccggcttcacggagacgtgctgcacttcgaggcggcggtgccattgcggtatcagtatgcatatgacctgcaatccggtgaaacaactgttagtaatcggccatcacagcagcatgatggtgaatacatgcagatgacgcccttcggccagtggaggctgcgtctgtctgcctcagccgtcgaaaaccaagggcttgccttccctacagctgtggctactgatctggacagctccaccacacaaatctccatcaccttccacctgacggccgtccggagaattgatacgcgcgctcttgtagagctgtag

SEQ ID NO: 899 - DNA, 2634 bp, Adiantum raddianum Gracillimum
  source 1..2634: mol_type = other DNA
atggatgtggattatgcagccgacgctatggatgtggattatgccgagatatacaaagaggtgaaccaggtgacaaggcccgtccctaccagggtgtgctctgaggtgatgtccatccagcgcatgtacttccagctggatgatctagacgcgaagcttctgaggaacacggaggtggtgaagagattatatgtgttcgcggacgtggtggagatggtgggacagagcgtggagctggcggcgtcggtcgaggtcgtcatcttgtgccggatcttcaagaccactcgaagcgatgcagtgctccgattcttgtccttgacgtcccggctggaatgcgatgcaacaccagtttacgcaagcgccaacgtggtgtctcactttttcgtgcgacctcgacctggagctgcggacccccgtttactcatcactatccacgccacacagctagtggcaccagctcgcacgcaactgcgagtacagcgccccaatgtggtgctgcatcgtgcacaattttgggctttagaagagatttttatgcctggaggagtttctacgggtgctacacaacctgttttaagaccagctgtcacacaggacggcgccatggagtggcgcatttcgccgtatgttgctggcggagccttagctgcacgatcttttcatttcacccacccgcacgtctatcggacatcccaagattatcttggcttcacgggcatcttcatccctgaacccataccgtatgacctacttacaaactccaacatttggttgggcatggaatgcaccacactcatatgcgagttgattgacaagtatcaaaggcaggccacacaaacggttgaagctgcacaccaccatgtggcatggctcgacaagcagcttctgtcgatgggaaatcggatcacctcttctaacatcccaaaaaagaatgtgcagcaaattgaaacacttcattttcgcgttcaatccctactcaagatatatcgtcgcacagcaaatggtgtggatgcgcccctcatagtcccctcgctccaatatgatgtctatgacagaattatcaatctcatgactagagctgccgagagctacgacaacgatttcaagcaactgaaccttttcattcaacaaaatgagatccttgggagtttcttgttggaccaaaatcgagccttcgctcagaaggaaagagacatggagaatcatcatttacaactggttactctacaaggtcatgagctgcaagcaacaggcgataagctacaagctcttaatcgtcaactagctgaacaaagcgaggccatggaccaagcaaaagctgacatggatgcaggtatcaaagaatatagagatgctatgattgcaaatgcaatcttcagtgtgttcaaagccattgctgcattgtgcttggccgccgccacaggtggtgccgcagcgggagctgcggccggagctgctgtggacacagcagcccagctgagtgagcttgcaagggtgctgcaatccgtggtgaaattattgaagaggatagaaaatgtagtgaaaacaatcaatgcaatcactgccttcttgacggaactcgagtcgctcaaccagttgatagaactacctgagatgccagaaatgccaacagatgcagattggtctatctttgagaatgagatagaggctgttgcagaaggcatgcccacagagatatcggaggtgccagcgtggaaggcaaagtgcaagaatgtggcggcagtaggaagagagatcatcacaaccgtggcccatgtggagaagctacagtacgagataagtgtgagtaagatgctccaagatattgcgcagcaacaggcggagagattggagggcttgaggattgaagacctagacaactacctggagatggcaacagagctagatatgagaaccaaccggatactcatgggcttgctggacatgctcagcttacagactggtgcgctctcataccactacctgctgcggcccaggccattcacaggatgggttcgcatggagaccgtgtggcgcacgcttcttcaaaatgagtcggataaactagtggccatagccgcattgggtgcacctcaagagtttagtcgatcctatgtggtggaaaacatacctgtgagcttgctgaaagaaggagcggattggatctttgatatccctgttcatgatcctgtctttccctctctttggtccagtgttcgcattgattacgtggaaatgaagttccccccagatacaacccaccttcccacaaccaagggtggcaaagtgtacttcctcctccaggctgctcgcttctttcatgatcgcctgcaggaagacgaggtcctgcattaccaggctgcagtgcctcttgtctaccagtacgcatatcatgttgagagcggcgagacgactcttagcaaccgtcctccccaggccagctctgctctttacatgcgcatgactcccttcacacgctggaggcttcgtctctctgcttctgctccagaaaatgaagggcttgaattccccactgccacaaccgaagatgccacaactgaaatcgccatcactttctttgtcactgccagacgccgaatcagtactcgtgtcgactctagtagcactacctag

SEQ ID NO: 900 - DNA, 2646 bp, Campyloneurum angustifolium
  source 1..2646: mol_type = other DNA
atggcagtcgcaacattaagggcggctgagtacagggagctgtacaaagaccttaaccaagtgagcgagggtttaatcctggagatgatggagttctcggaggtgatggtaatccatcggatgtatctgaggatggtggagctggacgtgggccatctggaaggagctgaaaaggtgaagcacttgtatgtgtttgcagatgtggtggagatggcacctgcatcgtccactgtgcgactgcctggctcggtctccgtttccatagtctgtcgtgtgctgtggctccctgtgccagtatctaatataccgctgatagcatttccccacttgaaactgcgtgcgaactttgcaagtgggtcgggcaatagacagttcaatgtctatcgaaggactgatggcggatcagaagtagatgaaggtttggccctttgcatacatgcggttgacatccagcttactggtgtgcccgcgttcgctgtgaactctcccgctttttacctcttcactgatccacgtaatctcaccatgccggccgaaggcgctattacgtttggcgaccctgataggcaagtgccagtgctaatgtttcgaatgtacgcagaggcgcagcgcttgtctggggttaacactgggattatacgcatttcccccccattttcaaacaacctgcgcatagccaccacagtccacgccccacctactgtaacattgttaactatagacactcatcacccacatgggcccggtttttggatactgagaggcatcccggacagtctactcaaatctgatcagttaatgctcttgatgcaaatgagcttactaattgcagagctcgcagagctggctcacccctcatcagaaacaagggctgccgtactagagcatgtggaatggcttagcggcgtcctcattgatggagcatctagcacagaagggacacaaatgcatcaagagtacttggagcttttatttcgtgcgcagtacctgctgaagacgacaagcagctcccgtagccttgtggtgccgcaattacaatatgctttgtatagccctctcatcaatcgcatggctcaggtcgctcaaatctacgatgatgcagtcaaccaattcaaactcttcatcgcacagaaccggatacttggtagctatctgcttgagcagaataaggcctctgcggaaagagagagagacttggaggtctttcacgcagagcttatctctcaaatgacgatcgaactcaacagcactctcttgaaaatggaccagttaagtcttcaaatggaagctcaaacagcagacatggagcaagccgaaagagagatggaagaaggactgaggaggttcagaaatagacaagttgcgagagccatcttttctgtgttcagagcaatagctgcagttgcgctaacagttgtaacaggtggtgcagctgcaccagctgccatgaacgcagccaggggtgccgtgtcagtagccgggcaggcagcaagagggttgcaaagtgtgctggaaatcctggagggtttgcaggtggtaatggaggtggtggctatcataaaagagctagtggaatccttgcaagatttagggaagctggtggaagctccggacatgccggagatgccaacggacgcggattgggcgatttttgtgaatgaggttgaggcagttgctgcggaaatgccagaggaagtgtcggaggtggtgacatggaagacaaagtgcaagaatgtggcagcggtaggccgggaattgatgacaacggcagcttacatatcccgcctgcagtatgacatcaaagagcattccatgttgcaggagattgccaagcgtcacgccaataggctggcgaacacccaggcagccaatcttagcagctacacggagatggtgatacagatggagatgcgcaccatgcgaatcatcatctcactggttaaggtggtctacgtgcagaatgctgccctcatgtaccagtacctcagccagcccacacaaatgcggcagacttggcccgtgagcatggagacagtatggagaatgttgacccaaagggagcatgcttcagttctggggttgataaggctagggccgtccttcgacttcgagcgcatctatgtagtgagggacattcctgtgagcctcttgcttactggggaggattgggagtttgagatccccgtctctgacgagaccaccttcccctccagctggactcgcgtgcgcatcaagcacctggaaatgaagtttgtccatgatgatggtagtgcagctgccggccaccaccagcccatcaccgacaccggcaaagtctacatccttctccaaagttcgcgcgtcttccacgaccgcgatcaagctggccgcgagcctctttcttacgaggctgcattgcccttggattaccagtatgcctatcacctcgacacaggagagaccacgctctctaacctgcccaccacccagttcatcaacaccatgactccctttaccaactggaggcttcgcctttctgcctctgccctcgagaaccaaggcctcgactttcctacggctagacaacaaggtgctgtcaaccaggacgccactacccagattgcaattaccttccatgtgtctgccattagacaaatctccttttag

SEQ ID NO: 901 - DNA, 2649 bp, Campyloneurum angustifolium
  source 1..2649: mol_type = other DNA
atggcagtcgcaacattaagggcggctgagtacagggagctgtacaaagacctcaaccaagtgagcgagggtttgatcctggagatgatggagttctcggaggtgatggtaatccatcggatgtatctgaggatggtggagctggacgtgggccatctggaaggagccgagaaagtgaagcacttgtatgtgtttgcagatgtggtggagatggctcctgcatcgtccactgtgcgactgcctggctcggtctccgtttccatagtctgtcgtctgctgtgggtccctgcgcaagtatctgatataccgctgatagcattcccccacttgaaactgcgtgtgatcttgccacgtggtccggtcggtgtagttttcaatcagttcgctgtctttcgaaggactgatggcggatcagaagtagatgaaggtttggccctttgcatacatgcggctgacatccagcttactggtgtgcccgcgtccgctgtgaactctgccgctttttacctcttcacggatccacataatctcaccatgacggccgaaggcgctattacgtatggcgaccttgataggcaagtgccagtgctaatgtttcgaatgtacgcagaggcgctgagcttgtcgggggttaacactgggattatacgcattccccccccatttataaacaacctgcgcgtagccaccacagtccacgccccacctactctattaactttagactcttatatgccaattccgcccgggttttggatactgagaggcatcccggacagtctactcaaatctgatcagttaatgctcttgatgcaaatgagcttactaattgcagagctcgcagagctggctcacccctcatcagaaacaagggctgccgtactcgagcatgtggaatggcttagcggcgtcctcattgatggagcatctagcacagaagggacacaaatgcatcaagagtacttggagcttttatttcgtgcgcaatacctgctgaagacggcaagcagctcccgtagccttgtggtgccgcaattacaatatgctttgtacagccctctcatcaatcgcatggctcaggtcgctcaaatctacgatgatgcagtcaaccaattcaaactcttcatctcacagaaccggatacttggtagctatttgcttgagcagaataaggcctctgcggaaagagagagagacttggaggtctttcacgcagagcttatctctcaaatgacgatcgaactcaacagcactctcttgaaaatggaccagttaagtcttcaaatggaagctcaaacagctgacatggagcaagccgaaagagagatggaagaaggactgaggaggttcagaaatagacaagttgcgagagccatgttttctgtgttcagagcaatagctgcagttgcgctaacagttgtaacaggtggtgcagctgcaccagctgccatgaacgcagccaggggtgccgtgtcagtagccgggcaggcagcaagagggttgcaaagtgtgctggaaatcctggagggtttgcaggtggtgatggaggtggtggctatcataaaagagctagtggaatccttgcaagatttagggaagctggtggaagctccagacatgccggagatgccaacggacgcggattgggcgatttttgtgaatgaggtcgaggcagttgctgcggaaatgccagaggaagtgtcggaggtggtgacatggaagacaaagtgcaagaatgtggcagcagtaggccgggaattgatgacaacggcagcttacatatcccgcctgcagtatgacatcaaagagcattccatgttgcaggagattgccaagcgtcacgccaataggctggcgaacacccaggcagccaatcttagcagctacacggagatggtgatacagatggagatgcgcaccatgcgaatcatcatctcactggttaaggtggtctacgtgcagaatgctgccctcatgtaccagtacctcagccagcccacacaaatgcggcagacttggcccgtgagcatggagacagtatggagaatgttgacccaaagggagcatgcttcagttctggggttgataaggctagggccgtccttcgacttcgagcgcatctatgtagtgagggacattcctgtgagcctcttgcttactggggaggattgggagtttgagatccccgtctctgacgagaccaccttcccctccagctggactcgcgtgcgcatcaagcacctggaaatgaagtttgtccatgatgatggtagtgcagctgccggccaccaccagcccatcaccgacaccggcaaagtctacatccttctccaaagttcgcgcgtcttccacgaccgcgatcaagctggccgcgagcctctttcttacgaggctgcattgcccttggattaccagtatgcctatcacctcgacacaggagagaccacgctctctaacctgcccaccacccagttcatcaacaccatgactccctttaccaactggaggcttcgcctttctgcctctgccctcgagaaccaaggcctcgactttcctacggctagacaacaaggtgctgtcaaccaggacgccactacccagattgcaattaccttccatgtgtctgccattagacaaatctccttttag

SEQ ID NO: 902 - DNA, 2658 bp, Campyloneurum angustifolium
  source 1..2658: mol_type = other DNA
atggcagtcgcaacattaagggcggctgagtacagggagctgtacaaagacctcaaccaagtgagcgagggtttgatcctggagatgatggagttctcggaggtgatggtaatccatcggatgtatctgaggatggtggagctggacgtgggccatctggaaggagccgagaaagtgaagcacttgtatgtgtttgcagatgtggtggagatggctcctgcatcgtccactgtgcgactgcctggctcggtctccgtttccatagtctgtcgtctgctgtgggtccctgcgcaagtatctgatataccgctgatagcattcccccacttgaaactgcgtgtgatcttgccacgtggtccggtcggtgtagttttcaatcagttcgctgtctttcgaaggactgatggcggatcagaagtagatgaaggtttggccctttgcatacatgcggctgacatccagcttactggtgtgcccgcgtccgctgtgaactctgccgctttttacctcttcacggatccacataatctcaccatgacggccgaaggcgctattacgtatggcgaccttgataggcaagtgccagtgctaatgtttcgaatgtacgcagaggcgctgagcttgtcgggggttaacactgggattatacgcattccccccccatttataaacaacctgcgcgtagccaccacagtccacgccccacctactctattaactttagactcttatatgccaattccgcccgggttttggatactgagaggcatcccggacagtctactcaaatctgatcagttaatgctcttgatgcaaatgagcttactaattgcagagctcgcagagctggctcacccctcatcagaaacaagggctgccgtactcgagcatgtggaatggcttagcggcgtcctcattgatggagcatctagcacagaagggacacaaatgcatcaagagtacttggagcttttatttcgtgcgcaatacctgctgaagacggcaagcagctcccgtagccttgtggtgccgcaattacaatatgctttgtacagccctctcatcaatcgcatggctcaggtcgctcaaatctacgatgatgcagtcaaccaattcaaactcttcatctcacagaaccggatacttggtagctatttgcttgagcagaataaggcctctgcggaaagagagagagacttggaggtctttcacgcagagcttatctctcaaatgacgatcgaactcaacagcactctcttgaaaatggaccagttaagtcttcaaatggaagctcaaacagctgacatggagcaagccgaaagagagatggaagaaggactgaggaggttcagaaatagacaagttgcgagagtcatgttttctgtgttcagagcaatagctgcagttgcgctaacagttgtaacaggtggtgcagctgcaccagctgccatgaacgcagccaggggtgccgtgtcagtagccgggcaggcagcaagagggttgcaaagtgtgctggaaatcctggagggtttgcaggtggtgatggaggtggtggctatcataaaagagctagtggaatccttgcaagatttagggaagctggtggaagctccagacatgccggagatgccaacggacgcggattgggcgatttttgtgaatgaggtcgaggcagttgctgcggaaatgccagaggaagtgtcggaggtggtgacatggaagacaaagtgcaagaatgtggcagcagtaggccgggaattgatgacaacggcagcttacatatcccgcctgcagtatgacatcaaagagcattccatgttgcaggagattgccaagcgtcacgccaataggctggcgaacacccaggcagccaatcttagcagctacacggagatggtgatacagatggagatgcgcaccatgcgaatcatcatctcactggttaaggtggtctacgtgcagaatgctgccctcatgtaccagtacctcagccagcccacacaaatgcggcagacttggcccgtgagcatggagacagtatggagaatgttgacccaaagggagcatgcttcagttctggggttgataaggctagggccgtccttcgacttcgagcgcatctatgtagtgagggacattcctgtgagcctcttgcttactggggaggattgggagtttgagatccccgtcgctgaagagaccaccttcccctccagctggactcgcgtgcgcatcaagcacctggaaatgaagtttgtccatgatgatggtagtggagctgccggccaccaccagcccatcaccgacaccggcaaagtctacatccttctccaaagttcgcgcgtcttccacgaccgcgatcaagctggccgcgagcctctttcttacgaggctgcattgcccttggattaccagtatgcctatcaccttgacacaggagagaccacgctctctaacctgcccaccacccagttcatcaacacctacatgaccatgactccctttaccaactggaggcttcgcctttctgcctctgccctcgagaaccaaggcctcgactttcctacggctagacaagaaggtgctgtcaaccaggacgccactacccagattgcaattaccttccatgtgtctgccattagacaaatctccttttag

SEQ ID NO: 903 - DNA, 2538 bp, Blechnum cartilagineum Sw
  source 1..2538: mol_type = other DNA
atggggaacgcctcaagcaccgattatgagcacatctacagaaacgccaacaacataagtaggatggtggctacgccggtgtgctcggaggtgatgtctgtagcccggatgtttgtaaggttgcgggacctggacgcatcgcggttgaagaaccctgaggttgtaaaggaattgtacgtggttgcagatgtggtggatatggaagagtataatgatttgaccctccctgggtcagaaagaatatacctgatctgccgtgtttttacgtggaggagaaaccagccacctccgacaactgtacgcatccgaactccatggttgaatttgtccagctgctccaaactagagatctgccccctgcgtcatgatcgccaggcacagacgtcacctgcattccaatgctttgctagagccaagcatagcacgacgtcggagattgcacctgccgtgctcttcttgcatgcggcacacatttatacgtctaatccagacacagacactagtcacctcaacgtggttctgcaggctcaggaatcagctcagtacacactaatgtcggcggaccagacaccttcaggagaagaaattttctgggaagtggagacttacccattacttcccaggagcgatctgaactcaaccatactgtcagcccaagaggccaacgtgctcgtcatcgagctcattctgagctacataactcatgctaccgagacggttaagcaagcatccttgcaccttgaatggctcaacaagctcctgaattatgcactcaacgacaccagcagtgcatcgacaggatcactagacgacgaggcactggaccgacaattgcacaatctctcattccaagtgcaatttctattgaaccagccgccaacgggtgctggcttaatagtgccacgcttgcaatattatgcatacagtaacctcgttggcacaatggcccgtattgctgagaactacgataaagaattcagacaattttctctttttatagagcaaaatgacgtccttggtacctacttgctccagcaaaacaaggcgtttgcagagaaggagagggagatggaggtttttcatttggagctgcagcaagtgaagaaggatgacttgacgcgggctttggcaaagttggaacgacttgaagttgacatgagagagatgaacgcagccatggagcaagcagagagagacatggaggcagatttagtacagtacaggaaccgtcaagttgctcgggctgtcttctcagtgataggtgccatcgctcagctgggtttagcattcttcaccggtggtgcaactgcagggggagcggtggcaggagtagctaatgccgttagtcaagtgacagacagtgcagctcttgcctccttgagaaggatttcagagaccttggagaagctggttttagtgacagaatttctagtggcaatgagggacctactcaacgctgtgatggatattcatcaagggccaccagaggtacccacattgccagagatggtgtcggaggcagaatgggcgattttcgagaacgagatcgaggctgtggcagcagggatgccagcagaggtgtctagtgtattgacatggaagaccaagtgcaagaatgtggcggctctagggcgagagatgataactctggccacaataatagtggacctgcagcatgacatcaaggtgcatggcctgatgcgggagatggcacaaaaccacgcacaacgtttgaaggcattgcagccagtggacctcaagaactaccaagaaatggcgacagagctggacatgagaactacaaggatgctgctgggcctcctcgaggttctctccctgcagaacgcagcacttcgctaccaatatctgttgccacccagcccagtcaccattgagagcaccagcctcaccatgtccactgcctggacgttactcctacaacatgaatctgcatctgtgataagccttgccgacctaggtttcgcgacagaccaggaggtggcatacatcgtcaagggcatacccgttggcttgctgctagatggggaagattgggactttcccatctctgtcagggatattgcagaaggtgctgctttcccagctgattggagccgtgtgcggatctcacatgtagaaatgaagtttgtcaaaccaggcgctgcgcctgctgatgaagaagaaactgtacatcagcccaccaccaacaccggcaaggtgcacatgcttctccgaggtgaacagctcttcgcagatcgcaagagaggcgaaagcttgaaatacgaggcagctgtgtcgatggagtaccaatacgcgtacaggcttgatacaggtgagaccacccagtccaatcgcccatcacaggagtttggggacaagctcttcatgcagatgacacccttcactcgctggaagcttcgcctgcccactgccgccaacgagaaccgaggattggccttccctacagctagtgccgaaaacgcaaccacccaaattaccattagtttccatgtcagtgccatcagaacaatattctag

SEQ ID NO: 904 - DNA, 2538 bp, Blechnum cartilagineum Sw
  source 1..2538: mol_type = other DNA
atggggaacgcctcaagcaccgattatgagcacatctacagaaacgccaacaacataagtaggatggtggctacgccggtgtgctcggaggtgatgtctgtagcccggatgtttgtaaggttgcgggacctggacgcatcgcggttgaagaaccctgaggttgtaaaggaattgtacgtggttgcagatgtggtggatatggaagagtataatgatttgaccctccctgggtcagaaagaatatacctgatctgccgtgtttttacgtggaggagaaaccagccacctccgacaactgtacgcatccgaactccatggttgaatttgtccagctgctccaaactagagatctgccccctgcgtcatgatcgccaggcacagacgtcacctgcattccaatgctttgctagagccaagcatagcacgacgtcggagattgcacctgccgtgctcttcttgcatgcggcacacatttatacgtctaatccagacacagacactagtcacctcaacgtggttctgcaggctcaggaatcagctcagtacacactaatgtcggcggaccagacaccttcaggagaagaaattttctgggaagtggagacttacccattacttcccaggagcgatctgaactcaaccatactgtcagcccaagaggccaacgtgctcgtcatcgagctcattctgagctacataactcatgctaccgagacggttaagcaagcatccttgcaccttgaatggctcaacaagctcctgaattatgcactcaacgacaccagcagtgcatcgacaggatcactagacgacgaggcactggaccgacaattgcacaatctctcattccaagtgcaatttctattgaaccagccgccaacgggtgctggcttaatagtgccacgcttgcaatattatgcatacagtaacctcgttggcacaatggcccgtattgctgagaactacgataaagaattcagacaattttctctttttatagagcaaaatgacgtccttggtacctacttgctccagcaaaacaaggcgtttgcagagaaggagagggagatggaggtttttcatttggagctgcagcaagtgaagaaggatgacttgacgcgggctttggcaaagttggaacgacttgaagttgacatgagagagatgaacgcagccatggagcaagcagagagagacatggaggcagatttagtacagtacaggaaccgtcaagttgctcgggctgtcttctcagtgataggtgccatcgctcagctgggtttagcattcttcaccggtggtgcaactgcagggggagcggtggcaggagtagctaatgccgttagtcaagtgacagacagtgcagctcttgcctccttgagaaggatttcagagaccttggagaagctggttttagtgacagaatttctagtggcaatgagggacctactcaacgctgtgatggatattcatcaagggccaccagaggtacccacattgccagagatggtgtcggaggcagaatgggcgattttcgagaacgagatcgaggctgtggcagcagggatgccagcagaggtgtctagtgtattgacatggaagaccaagtgcaagaatgtggcggctctagggcgagagatgataactctggccacaataatagtggacctgcagcatgacatcaaggtgcatggcctgatgcgggagatggcacaaaaccacgcacaacgtttgaaggcattgcagccagtggacctcaagaactaccaagaaatggcgacagagctggacatgagaactacaaggatgctgctgggcctcctcgaggttctctccctgcagaacgcagcacttcgctaccaatatctgttgccacccagcccagtcaccattgagagcaccagcctcaccatgtccactgcctggacgttactcctacaacatgaatctgcatctgtgataagccttgccgacctaggtttcgcgacagaccaggaggtggcatacatcgtcaagggcatacccgttggcttgctgctagatggggaagattgggactttcccatctctgtcagggatattgcagaaggtgctgctttcccagctgattggagccgtgtgcggatctcacatgtagaaatgaagtttgtcaaaccaggcgctgcgcctgttgatgaagaagaaactgtacatcagcccaccaccaacaccggcaaggtgcacatgcttctccgaggtgaacagctcttcgcagatcgcaagagaggcgaaagcttgaaatacgaggcagctgtgtcgatggagtaccaatacgcgtacaggcttgatacaggtgagaccacccagtccaatcgcccatcacaggagtttggggacaagctcttcatgcagatgacacccttcactcgctggaagcttcgcctgcccactgccgccaacgagaaccgaggattggccttccctacagctagtgccgaaaacgcaaccacccaaattaccattagtttccatgtcagtgccatcagaacaatattctag

SEQ ID NO: 905 - DNA, 2454 bp, Blechnum cartilagineum Sw
  source 1..2454: mol_type = other DNA
atggccgcagggaaaactgtgccgatgtacaaccacgacaaccagtctgcgacgatttgggctgagggcgagatggtctgggctgagagagagacgtcagatctcctgtgcgtgaattggccgtacatattgctggacgacctgggcgtgagcaggataagcaatccctcagcgataagacacgtagtggtgattgcagacgtggtggagatcgaccagcctctggtgtcgctgccagggagtctaagcatcacccttgtttgccggattcttcgcgtaagacaagcagccggagcagtgctacagttacgacaccttcaagcagaatgggctactttgagtcaggggcaaagtgcgcagttacatctttacgcgcaacaactggtgggtagtttagaggtgcatcagccggtaatgcatacgatagagcccgaaattccagaaactggacttccgcctattgggcctcctttcccaccgatcattgcgtcgtcgtacatgatttgggctatctccccctacacaaacgcatcacaatctaagcctgcctctctcacacttcatgggatcgttgtgacgcactcagatgaatggcacaacagatttaaggtcatcgtgcctcacagccctccgttggaagcttttgaaggtgtcgacatcctcctcgccatagaagcaggtttagctgtcgcagaaacgattctcacctttcagacgcatgcgagagaaagggtagaagcggcacggcggcatgcacagtggctcaaccagctccttcaggaactccttgattccggcaggagcttgaaggagcagattcttggacaattgttccgtacgcaggttctgttgaagctgcccgtggacagaagccaaactgatgcagtgccaagattgcaatatgagcggtacggcagcttgatcaacagaattgcacgagaggccgagagctacattacagagttcaagaaaatgagccttgtcatgcagcaactggatcaaacagctcgcggtagacaattgttggcaatgatggaaacgtttgctgcgaacgagagtgccatggaggtggaggagaccatctatctcgaggacgcagctgtactcgaaactaggcggaaaatttggaaacgtcaactagagaaactgcaagctgaaatggagcaggccaatcaggacatgaatgaaggattgacaggatataacgatcgcatagatgccaatgctatgtttgctattctcaaagctgtggcgagcattggcctagctatgtttacaggtggtgcaacagtagaagtcgcggtagcagaagcagctgtagccgtgagcctagttagcggtacaaatgcagggaggctacagaacgcgatcaaaacgttacaagtcttagtcggggtcatagaggtgctggtggcattaaacagttatttttcacaaggacaaattgagcagattcagaacgcacgggccatgccacagttaccaagcgaagcggaatggtcaagctttgaggatgacattgaggcagtggcagcgaccatgccaaaggaggcatcagaggtgcccacttggaaggccaaatgcaagaatatggccgtattttgtagagagctcacttcgacagcaagcgacctggcactcctccgctccaacatgagggtgcatgatatacgtaaagacatcgccatgatttatatggagcgcctaccacaaatgaacccagcggagaacttcaaggattatgcacaactggtagccttgttggacgtgcagaatagccggatactgttgcgcctacttgacatgtttgtgctgcagaatggagcgctagggtacgagtatttatttcctgtcacacgtctgatcagtggttggccaaaggtggagaatttgagcaccatgcttgcacggtctgaggcggaggcagcagactatctgttgacggaagtgggacagcagaccaacttttccgcgacctatgcagttcccgaaattcccgtgggtttgctacagaatcacgatgattggatattcaccatccccattaatggttctattgtgttgtcggatagatggtctcggatacgcatccacaatgtggatatcaggttcaggcagggcgccctccagccctctaccgttgacgaccaacttcacattctccttgaggctgcaccaacatttcgagatcgtcgtaaacaagatattctcgacttcaaggctgtggtacctgcaagctacacttttgcataccatctacgcacaggtgaaaccatgccaactccagaggtctctgaccaatatcccctcatgaagatgactcctttcactcagtggagactacgtctctctgatcagaatcatggtcttgcattccccacagctttatccccacacgacaccactgttatctcactcactttattcttttctcggatcgtcacagactggtaa

SEQ ID NO: 906 - DNA, 2556 bp, Adiantum pedatum
  source 1..2556: mol_type = other DNA
atggacgtggactacgcggcaatctacaaggacgtgaaccaggtgacgaggacggtggcgaccagccagtgttcggaggtgatggccatccagaggctgtacgtgcggctgaacgacctggacgtgaagggcctgaggaacgtggaggtggtgaagcaagtggtggtgtttgcggacgtggtggaagtggagggcggcgacgtactggagttgcccggctccacccaaatcaccatcgtgtgccgcgtgctccacaccaagcacccttctggtgcagtcattcggctgtcctccttggcgcccgtgaagtgccatgggcgagagcaccgtcacgcatccggcccgcgcacccactctgtcacgcccatgaacggccagctcgcctctgatggccaaatcgtcactattttggccaccgaggtggtggctcccgcgggagccagcctgcaagtgcaatgtccagtgctggtggatgcaaaaatttacgatagcgacggctatcatcccgactttttctacgacctcaacggcaccgccagttggagctctttgcctttcggcggtgccacaggcaccactgccgcaaccgcccgctcctttcagactaccaccatagctcctctcagctggataacctggacgatgaatgaagtggattggcaacctagcttcagggttgtcctccctgaaaccctcccgcctcgtcttcttgttaactccagcattctactggccatggaaaccaacatactcgccagcgagttgatctccgagtttcaacgagaagccgtgcaaacaactgctgctgtccatcagcacacgatatggctggatgaccaattccagcttgcggttcggtcttcccaacgccaagaccaattgcaaagccagcagatccgaaaccttcattttcgtgttcaatcactactcaagctacacagaatggattccaatgcacccctcgtagtaccccctctacaatacgagcaatacgataaacttatcaatctcatgactcaggctgcccagagttacgacaatgatttcaagaacctcaatcttttcatgcagcagaatgagatcctaggaaattttctcttggaccagaataaggcatttgcgcaaaaggaaagagacatggaggtgcatcattcacagcttgttggtttacaagatagagagctggagctaacaagagagaagtttgatagtttgctcataactcttgatcaacagaacagagagatggaaaaagctcaagctgatttggaagcaggtatcaaacagtatagggatagacagattgccttagcggtctttggtgcactcttagcggttgcacagctgtgttttgctgtcttcacgggtggcgctacggccggtgcggctgtggcaacagctgtccagcttagtgagactgcaaaagtattgcaatcagtggtgaaattgctgcagaggattgagaaggtagtgacaacactgtatgcttttattgactttttgtcagagatgcagagccttgaacagattgtaaatgcacctgaaatgccagagctaccaacagctgcagactggtatatctttgaaaatgaaatagtggctgttgcagagaccatgcctacagagatatcggaggtacctgtgtggaaggccaagtgcaagaatgttgccgcagttggtcgggaaatcatcaccactgctgtttatatgcagaagctacagtatgacttggctgtaaacaggatgctacaacaaatagcccaacaacaagcagagagattagagagcttgcagataaaagatctagacaactacttggagatggcaacagagctggatatgagaactacccggattcttatgggtttgctcaaggtgctgagcctacagacgggcgcattgtcataccattatctgctggagccgaggccgctcacgggatgggtacgaatggatgctgtgtggaatgcattattaaagaatgcgaccgacgcagtggtagcgctgtcgacgtcgggtgcatctaacgactttgtggtaaggtatacgattaaaggcataccggtgaatttgcttctggaaggaatggattggattttcgacattcctgtggatgaccccgccttcggggaatcacattggtcgcgtgtgcggattgagtatatagagatgaagttcgactcttcatcagatggccaccttcccaccaccacgggtgggcagatctacttccggctgcaggctggccgcttcttcgacgatcggctgggacatcagatccttcactacgaggctgcagtgccgcttgtctaccagtatgcctataggctcgcaagcggggaaaccactgtcagcaatcgtccctccctgtccagcagcactcattacatgcgcatgactcccttcacgcgatgggggctccgcctctccgcttctgctccagagaatcgagggcttgctttcccgaccgctacaactgaggatgccaccacccagatcaccctcaccttctacgttaccgccagacgccgaatcagcaatttttttcttcattag

SEQ ID NO: 907 - DNA, 2360 bp, Adiantum pedatum
  source 1..2360: mol_type = other DNA
atggacgtggactacgcggcaatctacaaggacgtgaaccaggtgacgaggacggtggcgaccagccagtgttcggaggtgatggccatccagaggctgtacgtgcggctgaacgacctggacgtgaagggcctgaggaacgtggaggtggtgaagcaagtggtggtgtttgcggacgtggtggaagtggagggcggcgacgtactggagttgcccggctccacccaaatcaccatcgtgtgccgcgtgctccacaccaagcacccttctggtgcagtcattcggctgtcctccttggcgcccgtgaagtgccgtgggcgagagcaccgtcacgcatccggcccgcgcacccactctgtcacgcccatgaacggacagctcgcctctgatggccaaatcgtcactattttggccaccgaggtggtggctcccgcgggagccagcctgcaagtgcaatgtccagtgctggtggatgcaacaatttacgatagcgacggctatcatcccgactttttctacgacctcaacggcaccgccagttggagctctttgcctttcggcggtgccacaggcaccactgccgcaaccgcccgctcctttcagactaccaccgtagctcctctcagctggataacctggacgatgaatgaagtggattggcaacctagcttcagggttgtcctccctgaaaccctcccgcctcgtcttcttgttaactccagcattctactggccatggaaaccaacatactcgccagcgagttgatctccgagtttcaacgagaagccgtgcaaacaactgctgctgtccatcagcacacgatatggctggatgaccaattccagcttgcggttcggtcttcccaacgccaagaccaattgcaaagccagcagagccgaaaccttcattttcgtgttcaatcactactcaagctagacagaatggattccaatgcacccctcgtagtaccccctctacaatacgagcaatacgataaacttatcaatctcatgactcaggctgcccagagttacgacaatgatttcaagaacctcaatcttttcatgcagcagaatgaggtatcaaacagtatagggatagacagattgccttagcggtctttggtgcactcttagcggttgcacagctgtgttttgctgtcttcacgggtggcgctacggccggtgcggctgtggcaacagctgtccagcttagtgagactgcaaaagtattgcaatcagtggtgaaattgctgcagaggattgagaaggtagtgacaacactgtatgcttttattgactttttgtcagagatgcagagccttgaacagattgtaaatgcacctgaaatgccagagctaccaacagctgcagactggtatatctttgaaaatgaaatagtggctgttgcagagaccatgcctacagagatatcggaggtacctgtgtggaaggccaagtgcaagaatgttgccgcagttggtcgggaaatcatcaccactgctgtttatatgcagaagctacagtatgacttggctgtaaacaggatgctacaacaaatagcccaacaacaagcagagagattagagagcttgcagataaaagatctagacaactacttggagatggcaacagagctggatatgagaactacccggattcttatgggtttgctcaaggtgctgagcctacagacgggcgcattgtcataccattatctgctggagccgaggccgctcacgggatgggtacgaatggatgctgtgtggaatgcattattaaagaatgcgaccgacgcagtggtagcgctgtcgacgtcgggtccatctaacgactttgtggtaaggtatacgattaaaggcataccggtgaatttgcttctggaaggaatggattggattttcgacattcctgtggatgaacccgccttcggggaatcacattggtcgcgtgtgcggattgagtatatagagatgaagttcgactcttcatcagatggccaccttcccaccaccacgggtgggcagatctacttccggctgcaggctggccgcttcttcgacgatcggctgggacatcagatccttcactacgaggctgcagtgccgcttgtctaccagtatgcctataggctcgcaagcggggaaaccactgtcagcaatcgtccctccctgtctagcagcactcattacatgcgcatgactcccttcacgcgatgggggctccgcctctccgcttctgctccagagaatcgagggcttgctttcccgaccgctacaactgaggatgccaccacccagatcaccctcaccttctacgttaccgccagacgccgaatcagcaatttttttcttcattag

SEQ ID NO: 908 - DNA, 2625 bp, Pteris cretica Roweri
  source 1..2625: mol_type = other DNA
atgtttactcaggatgatgactggtgcgtatatatgtactgcagtccgggtatattggatatggcggggcgcgaccacaacacggatgtgatcaactatgaggagatctacaaggccgtggatgaggtaaggaggacggtggtgccgagatccaaggatgcggtgatgatagtggagggcatgtatgtaaacctgaattcgcggattgatgatgggttgttcactggggatagttcgaaaccaaaggaggtgtgggtagtggcggacgtggtggcgctgtccaacgacgtcaaggtgcccacgtccacggagcggctggtcattctgtgtcgcatcctccacgttgatggcagttacgctaggttgttcagcgcttcgcaaaatgtcattctagattgtgattatatccaagaatctgaggcgatttccaaatcgtggaaggttcgatcgaccgagttacagatccacatctacgcgcaatgcttgcaagccccgtccagcaaagagctcatgccgctgtgcgtctcaattcctgctcatcgtaaatatcccttctttatttatgtgatgtggggcctttttggcatgttcgacagcggccgcggccgcatgatgcccgccttgagtttcccacgccatgaaaataatttcctgggccccctttttaggagtcgagaagagctcgagcagcttgagagattgttcgtggtctcactgtgtgacgagcagattcccgcggcattgctgagcgaggccgccattgtggaggccatgcaagccaccctcctcaaggctgagctcatcctcacctaccagacgcaggcccatggaggagccaccgcggagatggcaaggcagcacgtcgagtggcttcgttcccagctcaaggggtgcataagtagccagcaggaagggcaagtacagctggatgccggcttggctgccctgctcgtccgtgcagagagcctttcgaagatgccacaacgaactgcctacaatgtcgttcctagcttgacgtataaggcctatcgtgacctgattaacaggctggccacggcagccaaggactatgacaacagtttcatgcaaatgcggaccctcgtccaaagcagtcagatgaccgattcagatttcgagaccttgtacaaagcactcgcacagaaggagaaggatgtggatgaataccatcagcaactggcaaggctgaaacaaaacgagctgaaggaggtctcaagcagtctggatgtcctgaagtgcgaactggagaaacaaaagcaagcgatggacgaggctgagcaagatgctaatgatagactgaaagaatatgagatgaagcaagctgccaaagctgtgtttgaagtggtgaaggctgtgtttgccatgggggcagcggtgtttactgcgggcacaactgtaggagtagctctggagggtgtggaggaagcagtgaacgccagtggaaaaatgaaacaagccttggagctactagaaaagatcaacaagttactgaaagtcatggctgccatccagaagctcatcgactctctaaatcatctcaaggacgtgatcgaggcaccggagttgccaagcatgcccacggaggcagattgggacatatttgagaatgagattatggccgtggcaagccagctagagaaagccatcaatgtggccaattgggaagccaagtgcaagaatgtagcagcggtgggcaaggagttcatcaagaccgcaaatcgcatggggcagctgcaatacgaaatactggtgcaaaatttgcaaggtgaggtggctaggaggcacagggagcgtctggaggagatcatctccaagggcagagactacgacaagtatgaggagatagcaaggcacgttgagatgctgcggagcaatttgcacatcaggttactacatatcctggatctccagcgtgcggctgtgtactatcatttcctgctggaccaaacaccgttcaccgtgtgggtggacgtggacacggtgacagcaacactgatcgacaatgaggccgtcatactgacgaacctggacagtctgagcaagtgcagcgacaaaacaatcacttacagtgtggagggcataccagtaagtctgttggagagcggcggcgcttgggtctttagcatcgcggtcccgggatcagatcagagcggtcacaagggcttcaaagacttgagccgtgtgcgcattgagtacatgaccatcaagtttgctgctaattccgccaagccgcaaactcacgatgacgatgacactgacgacgacacggttctgttcttgatgcaagcagcgacagatttccaagaccgtaggaaggccgacaagaaagtgctacagtatgaggcggcggtgccattgcgctaccgatacgcctacaacttcagcactgaggaggagctggtagacaaccgccctagcaccagcggtggggtggaggatttctggatgcgcatgacgcccttcactacatggcgcctctctcttcctatctctgatccctacaatgaaggcctcaaatttgatgactcttctgcctccacaaccacgtccatacgcatcgtcttccatgtcagcgccattcgagacgagtcctatcttttcagatga

SEQ ID NO: 909 - DNA, 2719 bp, Pteris cretica Roweri
  source 1..2719: mol_type = other DNA
atgtttactcaggatgatgactggtgcgtatatatgtactgcagtccgggtatattggatatggcggggcgcgaccacaacacggatgtgatcaactatgaggagatctacaaggccgtggatgaggtaaggaggacggtggtgccgagatccaaggatgcggtgatgatagtggagggcatgtatgtaaacctgaattcgcggattgatgatgggttgttcactggggatagttcgaaaccaaaggaggtgtgggtagtggcggacgtggtggcgctgtccaacgacgtcaaggtgcccacgtccacggagcggctggtcattctgtgtcgcatcctccacgttgatggcagttacgctaggttgttcagcgcttcgcaaaatgtcattctagattgtgattatatccaagaatctgaggcgatttccaaatcgtggaaggttcgatcgaccgagttacagatccacatctacgcgcaatgcttgcaagccccgtccagcaaagagctcatgccgctgtgcgtctcaattcctgctcatcgtaaatatcccttctttatttatgtgatgtggggcctttttggcatgttcgacagcggccgcggccgcatgatgcccgccttgagtttcccacgccatgaaaataatttcctgggccccctttttaggagtcgagaagagctcgagcagcttgagagattgttcgtggtctcactgtgtgacgagcagattcccgcggcattgctgagcgaggccgccattgtggaggccatgcaagccaccctcctcaaggctgagctcatcctcacctaccagacgcaggcccatggaggagccaccgcggagatggcaaggcagcacgtcgagtggcttcgttcccagctcaaggggtgcataagtagccagcaggaagggcaagtacagctggatgccggcttggctgccctgctcgtccgtgcagagagcctttcgaagatgccacaacgaactgcctacaatgtcgttcctagcttgacgtataaggcctatcgtgacctgattaacaggctggccacggcagccaaggactatgacaacagtttcatgcaaatgcggaccctcgtccaaagcagtcagatgaccgattcagatttcgagaccttgtacaaagcactcgcacagaaggagaaggatgtggatgaataccatcagcaactggcaaggctgaaacaaaacgagctgaaggaggtctcaagcagtctggatgtcctgaagtgcgaactggagaaacaaaagcaagcgatggacgaggctgagcaagatgctaatgatagtaataagcacattgctgaatatgcaccactgcttgcactgaacaagctaatctcctacctgcaagagattaagttttagtaaacttattgcaggactgaaagaatatgagatgaagcaagctgccaaagctgtgtttgaagtggtgaaggctgtgtttgccatgggggcagcggtgtttactgcgggcacaactgtaggagtagctctggagggtgtggaggaagcagtgaacgccagtggaaaaatgaaacaagccttggagctactagaaaagatcaacaagttactgaaagtcatggctgccatccagaagctcatcgactctctaaatcatctcaaggacgtgatcgaggcaccggagttgccaagcatgcccacggaggcagattgggacatatttgagaatgagattatggccgtggcaagccagctagagaaagccatcaatgtggccaattgggaagccaagtgcaagaatgtagcagcggtgggcaaggagttcatcaagaccgcaaatcgcatggggcagctgcaatacgaaatactggtgcaaaatttgcaaggtgaggtggctaggaggcacagggagcgtctggaggagatcatctccaagggcagagactacgacaagtatgaggagatagcaaggcacgttgagatgctgcggagcaatttgcacatcaggttactacatatcctggatctccagcgtgcggctgtgtactatcatttcctgctggaccaaacaccgttcaccgtgtgggtggacgtggacacggtgacagcaacactgatcgacaatgaggccgtcatactgacgaacctggacagtctgagcaagtgcagcgacaaaacaatcacttacagtgtggagggcataccagtaagtctgttggagagcggcggcgcttgggtctttagcatcgcggtcccgggatcagatcagagcggtcacaagggcttcaaagacttgagccgtgtgcgcattgagtacatgaccatcaagtttgctgctaattccgccaagccgcaaactcacgatgacgatgacactgacgacgacacggttctgttcttgatgcaagcagcgacagatttccaagaccgtaggaaggccgacaagaaagtgctacagtatgaggcggcggtgccattgcgctaccgatacgcctacaacttcagcactgaggaggagctggtagacaaccgccctagcaccagcggtggggtggaggatttctggatgcgcatgacgcccttcactacatggcgcctctctcttcctatctctgatccctacaatgaaggcctcaaatttgatgactcttctgcctccacaaccacgtccatacgcatcgtcttccatgtcagcgccattcgagacgagtcctatcttttcagatga

SEQ ID NO: 910 - DNA, 2550 bp, Dryopteris marginalis
  source 1..2550: mol_type = other DNA
atggccgtcatggattacagcgagatttacagggatctgaaccagataagcatgggtgtggaccgggtagagttctcagaggtgatggtgatccacaggatgtacgtgaggttagctgatctggatgtgggggagctcgcgggagccgagagtgtgaagcgggtgtacgtgtttgcggatgtggtggagcttgcgccggggacgaggatgcaaatgccaggatcggtgacagtgatcatattgtgtcgtcttctgcaatttccaaccgatgggtcgcaagctgcaactctccagctgccgttcatgaagttgcatgccttactcagagagcgacatacgtcggagataacagcagcagatggcatgaattggggaacatacatacacggggaggaagtacaggtcatcataccatggtcaactgtaaattcaatacttcgagtttgggcagatggctctagtatgacctcatcctttcacaatgtgttcgacgaacctgggagaatagtttccactactgtatttacaaggcctggggcacccgacaatacgaccttgagtgcggaccccggcatgagcattcttaatagttttctacttcacacagtttccccttcggcattcagtgttttagctcgccaaagttccaatatatccttcacaaatattccagtagacgtggtgaccgatcctaacatcttgctgggcatccagaccaacgtgctcatcgcggagctagtccaggtctgtcacccgtcacctgaaatttttgctgctgtagctgagcacctgaattggctcaacaagatcatgctccaagttgtgaagaatgaaactcaattgcaagggaccgagtcctacaacgagtgcctcgcacttttgggtcgtattcaatctgtgataaagatagcgagacttggcttagtagtgccgcagttgcaatacagaatgtatagtagcctcatcaaccaaatggcccaagtagcacaaaactacgaccgagagttcaagcaattcaagcttttcattatccaaaatcaaatccttggtagctatttgttgcagcagaacagggtatttgctgacagggagcagcagatggagagtttccattcagtcgtcatttctcaaagaaaagaggagttggacagtgccactacaaaaatagagcgattgagtttgcaaatggaggcagagaatgacgcaatggagcaagccaaaaaggaaatggatgaaggattgcggaagtaccagaatgagcaagttgcaagggctgtcttttccgttctcagtgctatagctcagatcgggcttgcattcatcacgggcggtgcaacggctcctggagctgtggcgtcagcggcacaagctgtgagcatagcaggtcaggccgcacgagctcttgaaaaggtggtgaaaattttagagcagttggaggctgtgatggaggttgtgactgctgtgaaggagcttgtggattcattggaacagataggtcatattgtggaggcaccggtgatgccggagatgccctcagaggcggactggtccatttttgtgaatgagatcgaggcagtggcagagcagatgccgacggaagtcgcagaggtgccggcgtggaaggccaagtgcaagaatgttgctgcattgggtcgggagatgagcatcacggctgcccacatttctcagctccagtacgacatatgggtgcaaggcatgctgcgggaaatcgctcaaagccaggctgacaagctagcggcaattcaacccgtggaccttaccaactatttggaaatggtaacacagatggatatgcggacttcaaggatgctgctagggctcatcaacatacttcgcattcagaatgcagcgctcatgtacgagtaccttctcacaccgacgcagctcacagcatggccattggccatggatactgtggggaccttgcttatccagcaggagagttctgcactgataggattagctcagctaggccccccgtccgattacacgagcacgcacgtggtgaaagacatacctgtgagcttgctgcttgatggtgatgattgggagttcgagatccctgtgcaagatggcaccacctttccttccagctggtctcgcgtccgcattcggcacctggagatgcactttgtgcaggctggcggtgacgagcagccgcagattatccaccagcccgccacccaaactggctccgtttacatcctcctgcagggctccactatcttccatgaccgcagaagggatgaggtgatgacctttgaggcagctgttcctctcaactaccattacgggtaccgcctcgacactggcgaaaccactgttacgaatgtaccctcagaacattttgccaacacattcatgcagatgacacccttcactcgctggagacttcgtctctctgcgtccgccgcagagaatgcaggattagcctttcccacagctacagctccggactccactacccagattgtcatcactttccatgtttcggccattaggcaaattgattggcggcacgacgagtag

SEQ ID NO: 911 - DNA, 2550 bp, Dryopteris marginalis
  source 1..2550: mol_type = other DNA
atggccgtcatggattacagcgagatttacagggatctgaaccagataagcatgggtgtggaccgggtagagttctcagaggtgatggtgatccacaggatgtacgtgaggttagctgatctggatgtgggggagctcgcgggagccgagagtgtgaagcgggtgtacgtgtttgcggatgtggtggagcttgcgccggggacgaggatgcaaatgccaggatcggtgacagtgatcatattgtgtcgtcttctgcaatttccaaccgatgggtcgcaagctgcaactctccagctgccgttcatgaagttgcatgccttactcagagagcgacatacgtcggagataacagcagcagatggcatgaattggggaacatacatacacggggaggaagtacaggtcatcataccatggtcaactgtaaattcaatacttcgagtttgggcagatggctctagtatgacctcatcctttcacaatgtgttcgacgaacctgggagaatagtttccactactgtatttacaaggcctggggcacccgacaatacgaccttgagtgcggaacccggcatgagcattcttaatagttttctacttcacacagtttccccttcggcattcagtgttttagctcgccaaagttccaatatatccttcacaaatattccagtagacgtggtgaccgatcctaacatcttgctgggcatccagaccaacgtgctcatcgcggagctagtccaggtctgtcacccgtcacctgaaatttttgctgctgtagctgagcacctgaattggctcaacaagatcatgctccaagttgtgaagaatgaaactcaattgcaagggaccgagtcctacaacgagtgcctcgcacttttgggtcgtattcaatctgtgataaagatagcgagacttggcttagtagtgccgcagttgcaatacagaatgtatagtagcctcatcaaccaaatggcccaagtagcacaaaactacgaccgagagttcaagcaattcaagcttttcattatccaaaatcaaatccttggtagctatttgttgcagcagaacagggtatttgctgacagggagcagcagatggagagtttccattcagtcgtcatttctcaaagaaaagaggagttggacagtgccactacaaaaatagagcgattgagtttgcaaatggaggcagagaatgacgcaatggagcaagccaaaaaggaaatggatgaaggattgcggaagtaccagaatgagcaagttgcaagggctgtcttttccgttctcagtgctatagctcagatcgggcttgcattcatcacgggcggtgcaacggctcctggagctgtggcgtcagcggcacaagctgtgagcatagcaggtcaggccgcacgagctcttgaaaaggtggtgaaaattttagagcagttggaggctgtgatggaggttgtgactgctgtgaaggagcttgtggattcattggaacagataggtcatattgtggaggcaccggtgatgccggagatgccctcagaggcggactggtccatttttgtgaatgagatcgaggcagtggcagagcagatgccgacggaagtcgcagaggtgccggcgtggaaggccaagtgcaagaatgttgctgcattgggtcgggagatgagcatcacggctgcccacatttctcagctccagtacgacatatgggtgcaaggaatgctgcgggaaatcgctcaaagccaggctgacaagctagcggcgattcaacccgtggaccttaccaactatttggaaatggtaacacagatggatatgcggacttcaaggatgctgctagggctcatcaacatacttcgcattcagaatgcagcgctcatgtacgagtaccttctcacaccgacgcagctcacagcatggccgttggccatggatactgtggggaccttgcttatccagcaggagagttctgcactgataggattagctcagctaggccccccgtccgattacacgagcacgcacgtggtgaaagacatacctgtgagcttgctgcttgatggtgatgattgggagttcgagatccctgtgcaagatggcaccacctttccttccagctggtctcgcgtccgcattcggcacctggagatgcactttgtgcaggctggcggtgacgagcagcagcagattatccaccagcccgccacccaaactggctccgtttacatcctcctgcagggctccactatcttccatgaccgcagaagggatgaggtgatgacctttgaggcagctgttcctctcaactaccattacgggtaccgcctcgacactggcgaaaccactgttacgaatgtaccctcagaacattttgccaacacattcatgcagatgacacccttcactcgctggagacttcgtctctctgcgtccgccgcagagaatgcaggattagcctttcccacagctacagctccggactccactacccagattgtcatcactttccatgtttcggccattaggcaaattgattggcggcacgacgagtag

SEQ ID NO: 912 - DNA, 2550 bp, Dryopteris marginalis
  source 1..2550: mol_type = other DNA
atggccgtcatggattacagcgagatttacagggatctgaaccagataagcatgggtgtggaccgggtagagttctcagaggtgatggtgatccacaggatgtacgtgaggttagctgatctggatgtgggggagctcgcgggagccgagagtgtgaagcgggtgtacgtgtttgcggatgtggtggagcttgcgccggggacgaggatgcaaatgccaggatcggtgacagtgatcatattgtgtcgtcttctgcaatttccaaccgatgggtcgcaagctgcaactctccagctgccgttcatgaagttgcatgccttactcagagagcgacatacgtcggagataacagcagcagatggcatgaattggggaacatacatacacggggaggaagtacaggtcatcataccatggtcaactgtaaattcaatacttcgagtttgggcagatggctctagtatgacctcatcctttcacaatgtgttcgacgaacctgggagaatagtttccactactgtatttacaaggcctggggcacccgacaatacgaccttgagtgcggaacccggcatgagcattcttaatagttttctacttcacacagtttccccttcggcattcagtgttttagctcgccaaagttccaatatatccttcacaaatattccagtagacgtggtgaccgatcctaacatcttgctgggcatccagaccaacgtgctcatcgcggagctagtccaggtctgtcacccgtcacctgaaatttttgctgctgtagctgagcacctgaattggctcaacaagatcatgctccaagttgtgaagaatgaaactcaattgcaagggaccgagtcctacaacgagtgcctcgcacttttgggtcgtattcaatctgtgataaagatagcgagacttggcttagtagtgccgcagttgcaatacagaatgtatagtagcctcatcaaccaaatggcccaagtagcacaaaactacgaccgagagttcaagcaattcaagcttttcattatccaaaatcaaatccttggtagctatttgttgcagcagaacagggtatttgctgacagggagcagcagatggagagtttccattcagtcgtcatttctcaaagaaaagaggagttggacagtgccactacaaaaatagagcgattgagtttgcaaatggaggcagagaatgacgcaatggagcaagccaaaaaggaaatggatgaaggattgcggaagtaccagaatgagcaagttgcaagggctgtcttttccgttctcagtgctatagctcagatcgggcttgcattcatcacgggcggtgcaacggctcctggagctgtggcgtcagcggcacaagctgtgagcatagcaggtcaggccgcacgagctcttgaaaaggtggtgaaaattttagagcagttggaggctgtgatggaggttgtgactgctgtgaaggagcttgtggattcattggaacagataggtcatattgtggaggcaccggtgatgccggagatgccctcagaggcggactggtccatttttgtgaatgagatcgaggcagtggcagagcagatgccgacggaagtcgcagaggtgccggcgtggaaggccaagtgcaagaatgttgctgcattgggtcgggagatgagcatcacggctgcccacatttctcagctccagtacgacatatgggtgcaaggcatgctgcgggaaatcgctcaaagccaggctgacaagctagcggcaattcaacccgtggaccttaccaactatttggaaatggtaacacagatggatatgcggacttcaaggatgctgctagggctcatcaacatacttcgcattcagaatgcagcgctcatgtacgagtaccttctcacaccgacgcagctcacagcatggccattggccatggatactgtggggaccttgcttatccagcaggagagttctgcactgataggattagctcagctaggccccccgtccgattacacgagcacgcacgtggtgaaagacatacctgtgagcttgctgcttgatggtgatgattgggagttcgagatccctgtgcaagatggcaccacctttccttccagctggtctcgcgtccgcattcggcacctggagatgcactttgtgcaggctggcggtgacgagcagccgcagattatccaccagcccgccacccaaactggctccgtttacatcctcctgcagggctccactatcttccatgaccgcagaagggatgaggtgatgacctttgaggcagctgttcctctcaactaccattacgggtaccgcctcgacactggcgaaaccactgttacgaatgtaccctcagaacattttgccaacacattcatgcagatgacacccttcactcgctggagacttcgtctctctgcgtccgccgcagagaatgcaggattagcctttcccacagctacagctccggactccactacccagattgtcatcactttccatgttttggccattaggcaaattgattggcggcacgacgagtag

SEQ ID NO: 913 - DNA, 2550 bp, Dryopteris marginalis
  source 1..2550: mol_type = other DNA
atggccgtcatggattacagcgagatttacagggatctgaaccagataagcatgggtgtggaccgggtagagttctcagaggtgatggtgatccacaggatgtacgtgaggttagctgatctggatgtgggggagctcgcgggagccgagagtgtgaagcgggtgtacgtgtttgcggatgtggtggagcttgcgccggggacgaggatgcaaatgccaggatcggtgacagtgatcatattgtgtcgtcttctgcaatttccaaccgatgggtcgcaagctgcaactctccagctgccgttcatgaagttgcatgccttactcagagagcgacatacgtcggagataacagcagcagatggcatgaattggggaacatacatacacggggaggaagtacaggtcatcataccatggtcaactgtaaattcaatacttcgagtttgggcagatggctctagtatgacctcatcctttcacaatgtgttcgacgaacctgggagaatagtttccactactgtatttacaaggcctggggcacccgacaatacgaccttgagtgcggaccccggcatgagcattcttaatagttttctacttcacacagtttccccttcggcattcagtgttttagctcgccaaagttccaatatatccttcacaaatattccagtagacgtggtgaccgatcctaacatcttgctgggcatccagaccaacgtgctcatcgcggagctagtccaggtctgtcacccgtcacctgaaatttttgctgctgtagctgagcacctgaattggctcaacaagatcatgctccaagttgtgaagaatgaaactcaattgcaagggaccgagtcctacaacgagtgcctcgcacttttgggtcgtattcaatctgtgataaagatagcgagacttggcttagtagtgccgcagttgcaatacagaatgtatagtagcctcatcaaccaaatggcccaagtagcacaaaactacgaccgagagttcaagcaattcaagcttttcattatccaaaatcaaatccttggtagctatttgttgcagcagaacagggtatttgctgacagggagcagcagatggagagtttccattcagtcgtcatttctcaaagaaaagaggagttggacagtgccactacaaaaatagagcgattgagtttgcaaatggaggcagagaatgacgcaatggagcaagccaaaaaggaaatggatgaaggattgcggaagtaccagaatgagcaagttgcaagggctgtcttttccgttctcagtgctatagctcagatcgggcttgcattcatcacgggcggtgcaacggctcctggagctgtggcgtcagcggcacaagctgtgagcatagcaggtcaggccgcacgagctcttgaaaaggtggtgaaaattttagagcagttggaggctgtgatggaggttgtgactgctgtgaaggagcttgtggattcattggaacagataggtcatattgtggaggcaccggtgatgccggagatgccctcagaggcggactggtccatttttgtgaatgagatcgaggcagtggcagagcagatgccgacggaagtcgcagaggtgccggcgtggaaggccaagtgcaagaatgttgctgcattgggtcgggagatgagcatcacggctgcccacatttctcagctccagtacgacatatgggtgcaaggcatgctgcgggaaatcgctcaaagccaggctgacaagctagcggcaattcaacccgtggaccttaccaactatttggaaatggtaacacagatggatatgcggacttcaaggatgctgctagggctcatcaacatacttcgcattcagaatgcagcgctcatgtacgagtaccttctcacaccgacgcagctcacagcatggccattggccatggatactgtggggaccttgcttatccagcaggagagttctgcactgataggattagctcagctaggccccccgtccgattacacgagcacgcacgtggtgaaagacatacctgtgagcttgctgcttgatggtgatgattgggagttcgagatccctgtgcaagatggcaccacctttccttccagctggtctcgcgtccgcattcggcacctggagatgcactttgtgcaggctggcggtgacgagcagccgcagattatccaccagcccgccacccaaactggctccgtttacatcctcctgcagggctccactatcttccatgaccgcagaagggatgaggtgatgacctttgaggcagctgttcctctcaactaccattacgggtaccgcctcgacactggcgaaaccactgttacgaatgtaccctcagaacattttgccaacacattcatgcagatgacacccttcactcgctggagacttcgtctctctgcgtccgccgcagagaatgcaggattagcctttcccacagctacagctccggactccactacccagattgtcatcactttccatgttttggccattaggcaaattgattggcggcacgacgagtag

SEQ ID NO: 914 - DNA, 2550 bp, Dryopteris intermedia
  source 1..2550: mol_type = other DNA
atggccgtcatggattacagtgagatttacaggcatctgaaccagataagcatggatgtggaccgggtagagttctcagaggtgatggtgatccacaggatgtacgtgaggttagctgatctggatgtgggggagctcgtgggagccgagagtgtgaagcgggtgtacgtgtttgcggatgtggtggagcttgcgccggggacaaggatgcaaatgccaggatcggtgacagtgatcatattgtgtcgtcttctgcaatttccaaccgatgggtcgcaagctgcaactctccagctgccattcatgaagttgcatgccttactcagagagcgatttacgtcggagataacagcagcagatggcatgaattggggaacgtacatacacggggatgaagtacaggtcatcataccatggtcaactgtaaattcaatacttcgagtttgggcagacagctctagtatgacctcatcctttcacaatgtgttcgacgaacctgggagaatagtttccactacttcatttacaaggcctggggcacccgacaatacgaccttgagtgcgcatcccggcatgagcgttcttaatagttttctactttacacagtttccccttcggcattcagtgttttagatcgccaaagttccaatatatccttcacaaatattccagtagacgtgatgaccgatcctaacatcttgctgggcatccagaccaatgtgctcatcgcggagctagtccaggtctgtcacccgtcacctgaaatttttgctgctgtagctgagcacctgaattggctcaacaagatcatgctccaagttgtgaagaatgaaactcaattgcaagggaccgagtcctacaacgagtgcctcgcacttttgggtcgtattcaatctgtgataaagatagcgagacttggcttagtagtgccgcagttgcaatacagaatgtatagtagcctcatcaaccaaatggcccaaatagctcaaaactacgaccgagatttcaggcaattcaagcttttcattatccaaaatcaaatccttggtagctatttgttgcagcagaacagggtatttgctgacagggagcagcagatggagagttttcattcagtcgtcatttctcaaagaaaagaggagttggacaatgccactacaaaaatagagcgattgagtttgcaaatggaggcagagaatggcgcaatggagcaagccaaaaaggaaatggatgaaggattgcggaagtaccagaatgagcaagttgcaagggctgtcttttccgttctcagtgctatagctcagatcgggcttgcattcatcacgggcggtgcaacggctcctggagctgtggcgtcagcggcgcaagctgtgagcatagcaggtcaggccgcacgagctcttgaaaaggtggtgaaaattttagagcagttggaggctgtgatggaggttgtgactgctgtgaaggagcttgtggattcattggaacagataggtcatattgtggaggcaccggtgatgccagagatgccctcagaggcggactggtccatttttgtgaacgagatcgaggcagtggcagagcagatgccgacggaagtcgcagaggtgccggcgtggaaggccaagtgcaagaatgttgctgcattgggtcgggagatgagcatcacggcagcatacatttctcagctccagtacgacatatgggtgcaaggcatgctgcgggaaatcgctcaaagccaggctgacaagctggcggcgattcaacccgtggaccttaccaactatttggaaatggtaacacagatggatatgcggacttcaaggatgctgctagggctcgtcaacatacttcgcattcagaatgcagcgctcatgtacgagtaccttctcacaccgacgcagctcacagcatggccattgtccatggatactgtggggaccttgcttatccagcaggagagttctgcactgataggattagctcagctaggccccccctctgattacacgagcacgcacgtggtgaaagacatacctgtgagcttgctgcttgatggtggtgattgggagttcgagatccctgtgcaagatggcaccacctttccttccagctggtctcgcgtccgcattcggcacttggagatgcactttgtgcaggccagcggtgacgagcagcagcagattatccaccagcccgccactcaaactggctccgtttacatcctcctgcagggctccactatcttccatgaccgcagaagagatgaggtgatgacctttgaggcagctgttcctctcaactaccattacgggtaccgcctcgacactggcgaaaccactgttacaaatgtaccctcggaacattttgccaacacattcatgcagatgacacccttcactcgctggagacttcgtctctctgcatctgctgcagagaatgcaggattagcctttcccacagcaacagctccggactccactacccagattgtcatcactttccatgtttcggccattaggcaaattgattggcggcacgacgagtag

SEQ ID NO: 915 - DNA, 2550 bp, Dryopteris intermedia
  source 1..2550: mol_type = other DNA
atggccgtcatggattacagcgagctttacagggatctgaaccagataagcatgggtgtggaccgggtagagttctcagaggtgatggtgatccacaggatgtacgtgaggttagctgatcttgatgtaggggagctcgtgggagccgagagagtgaagcgggtgtacgtgtttgcggatgtggtggagcttgcgccggggccaaagatgcaaatgccaggatcggtgacagtcatcatattgtgtcgtcttctgcaatttccaaccaataggtcgcaagccgcaactctccagctgccgttcatgaagttgcgtgcctttctcagagaggagaataggtcggagataacagcagccgatggcatgaattggggaacgtacatacacggggaggaagtacaggtcttcataccatcatcaactgtaaattcaatacttacagtttgggcagacggctctattataacttcatcctttcacaatgtgttcgacgaacctgggagaatagtttccactactgtatttacaagtcctggggcacccgacaatacgaccatgcgcgcggaacccggcatgagcagtcttaattggtttctacttcgcacagtttccccttcggcattcagtgtcttagctcgccaaagttcgaatatatccttcacaaatattccagtagacgtggtgaccgatcctaacatcctgctgggcatccagaccaatgtgctcattgcggagctagtccaggtctgtcacccgtcacctgacatttttgcggctgtagccgagcacctgaattggctcaacaagatcttgctccaagttgtgaagaatgaaactcaattgcaagggaccgagtcctacaacgagtgcctcgcacttttgggtcgtattcaatctgtgatgaagatagtgagacctggcttagtagtgccgcagttgcaatacagaatgtatagtagcctcatcaaccaaatggcccaagtagcacaaaactacgaccgagatttcaagcaattcaagcttttcatcatccaaaatcaaatccttggtagctatttgttgcagcagaacagggtatttgctgacagggagcagcagatggagagttttcattcagtcgtcatttctcaaagaaaagaggagttggacagtaccactacaaaaatagagcgattgagtttgcaaatggaggcagagaatggcgcaatggagcaagccaaaaaggaaatggatgaaggattgcggaagtatcagaatgagcaagttgcaagggccgtctttgccgttctcagcgctgtagctcagatcgggcttgcattcatcacgggaggtgcaacggctcctggagctgtggcgtcagcgggacaagctgtgagcatagcaggtcaggcggcacaagctctggaaaaggtggtgaaaattttagagcggttggaggctgtgatggaggttgtgactgctgtgaaggagctggtggattcattggaacagataggtcttattgtggaggcaccggtgatgccggagatgccctcagaggcggactggtccatttttgtgaacgagatcgaggcagtggcagagcagatgccgacagaagtcgcagaggtgccggcatggaaggccaagtgcaagaatgttgctgcattgggtcgggagatgagcatcacggcagcatacatttctcagctccagtacgacatatgggtgcaaggcatgctgcgggaaatcgctcaaagccaggctgacaagctggcggcgattcaacccgtggaccttaccaactatttggaaatggcaacacagatggatatgcggacttcaaggatgctgctagggctcatcaacatgcttcgcattcagaatgcagcgctcatgtacgagtaccttctcacaccgacgcagctcacagcatggccagtgaccatggataccgtggggaccttgcttatccagcaggagaattctgcactgataggattagctcagctaggccccccatccgattacacgagcacgcacgtggtgaaagacatacctgtgagcttgctgcttgatggtgctgattgggagttcgagatccctgtgcaagatggcaccacctttccttccagctggtctcgcgtccgcattcggcacctggagatgcactttgtgcaggccagcggtgacgagcagcagcagattatccaccagcccgccacccaaactggctccgtttacatcctcctgcagggctccactatcttccatgaccggagaagagacgaggtgatgaccttcgaggcagctgttcctctcaactaccattatgggtaccgccttgacactggcgaaaccactgttacgaatgtaccctcggaacattttgccaacacattcatgcagatgacacccttcactcgctggagacttcgtctctctgcgtccgccccagagaatgcagggttagcctttcccacagctacagctctggactccactacccagattgtcatcactttccatgtttcggccattaggcaaattgattggcggcacgacgagtag

SEQ ID NO: 916 - DNA, 2550 bp, Dryopteris intermedia
  source 1..2550: mol_type = other DNA
atggccgtcatggattacagcgagctttacagggatctgaaccagataagcatgggtgtggaccgggtagagttctcagaggtgatggtgatccacaggatgtacgtgaggttagctgatcttgatgtaggggagctcgtgggagccgagagagtgaagcgggtgtacgtgtttgcggatgtggtggagcttgcgccggggccaaagatgcaaatgccaggatcggtgacagtcatcatattgtgtcgtcttctgcaatttccaaccaataggtcgcaagccgcaactctccagctgccgttcatgaagttgcgtgcctttctcagagaggagaataggtcggagataacagcagccgatggcatgaattggggaacgtacatacacggggaggaagtacaggtcttcataccatcatcaactgtaaattcaatacttacagtttgggcagacggctctattataacttcatcctttcacaatgtgttcgacgaacctgggagaatagtttccactactgtatttacaagtcctggggcacccgacaatacgaccatgcgcgcggaacccggcatgagcagtcttaattggtttctacttcgcacagtttccccttcggcattcagtgtcttagctcgccaaagttcgaatatatccttcacaaatattccagtagacgtggtgaccgatcctaacatcctgctgggcatccagaccaatgtgctcattgcggagctagtccaggtctgtcacccgtcacctgacatttttgcggctgtagccgagcacctgaattggctcaacaagatcttgctccaagttgtgaagaatgaaactcaattgcaagggaccgagtcctacaacgagtgcctcgcacttttgggtcgtattcaatctgtgataaagatagcgagacttggcttagtagtgccgcagttgcaatacagaatgtatagtagcctcatcaaccaaatggcccaaatagctcaaaactacgaccgagatttcaggcaattcaagcttttcattatccaaaatcaaatccttggtagctatttgttgcagcagaacagggtatttgctgacagggagcagcagatggagagttttcattcagtcgtcatttctcaaagaaaagaggagttggacaatgccactacaaaaatagagcgattgagtttgcaaatggaggcagagaatggcgcaatggagcaagccaaaaaggaaatggatgaaggattgcggaagtaccagaatgagcaagttgcaagggctgtcttttccgttctcagtgctatagctcagatcgggcttgcattcatcacgggcggtgcaacggctcctggagctgtggcgtcagcggcgcaagctgtgagcatagcaggtcaggccgcacgagctcttgaaaaggtggtgaaaattttagagcagttggaggctgtgatggaggttgtgactgctgtgaaggagcttgtggattcattggaacagataggtcatattgtggaggcaccggtgatgccagagatgccctcagaggcggactggtccatttttgtgaacgagatcgaggcagtggcagagcagatgccgacggaagtcgcagaggtgccggcgtggaaggccaagtgcaagaatgttgctgcattgggtcgggagatgagcatcacggcagcatacatttctcagctccagtacgacatatgggtgcaaggcatgctgcgggaaatcgctcaaagccaggctgacaagctggcggcgattcaacccgtggaccttaccaactatttggaaatggtaacacagatggatatgcggacttcaaggatgctgctagggctcgtcaacatacttcgcattcagaatgcagcgctcatgtacgagtaccttctcacaccgacgcagctcacagcatggccattgtccatggatactgtggggaccttgcttatccagcaggagagttctgcactgataggattagctcagctaggccccccctctgattacacgagcacgcacgtggtgaaagacatacctgtgagcttgctgcttgatggtgctgattgggagttcgagatccctgtgcaagatggcaccacctttccttccagctggtctcgcgtccgcattcggcacttggagatgcactttgtgcaggccagcggtgacgagcagcagcagattatccaccagcccgccactcaaactggctccgtttacatcctcctgcagggctccactatcttccatgaccgcagaagagatgaggtgatgacctttgaggcagctgttcctctcaactaccattacgggtaccgcctcgacactggcgaaaccactgttacaaatgtaccctcggaacattttgccaacacattcatgcagatgacacccttcactcgctggagacttcgtctctctgcatctgctgcagagaatgcaggattagcctttcccacagcaacagctccggactccactacccagattgtcatcactttccatgtttcggccattaggcaaattgattggcggcacgacgagtag

SEQ ID NO: 917 - DNA, 2550 bp, Dryopteris intermedia
  source 1..2550: mol_type = other DNA
atggccgtcatggattacagtgagatttacaggcatctgaaccagataagcatggatgtggaccgggtagagttctcagaggtgatggtgatccacaggatgtacgtgaggttagctgatctggatgtgggggagctcgtgggagccgagagtgtgaagcgggtgtacgtgtttgcggatgtggtggagcttgcgccggggacaaggatgcaaatgccaggatcggtgacagtgatcatattgtgtcgtcttctgcaatttccaaccgatgggtcgcaagctgcaactctccagctgccattcatgaagttgcatgccttactcagagagcgatttacgtcggagataacagcagcagatggcatgaattggggaacgtacatacacggggatgaagtacaggtcatcataccatggtcaactgtaaattcaatacttcgagtttgggcagacagctctagtatgacctcatcctttcacaatgtgttcgacgaacctgggagaatagtttccactacttcatttacaaggcctgggtcacccgacaatacgaccttgagtgcgcatcccggcatgagcgttcttaatagttttctactttacacagtttccccttcggcattcagtgttttagatcgccaaagttccaatatatccttcacaaatattccagtagacgtgatgaccgatcctaacatcttgctgggcatccagaccaatgtgctcatcgcggagctagtccaggtctgtcacccgtcacctgaaatttttgctgctgtagctgagcacctgaattggctcaacaagatcatgctccaagttgtgaagaatgaaactcaattgcaagggaccgagtcctacaacgagtgcctcgcacttttgggtcgtattcaatctgtgataaagatagcgagacttggcttagtagtgccgcagttgcaatacagaatgtatagtagcctcatcaaccaaatggcccaaatagctcaaaactacgaccgagatttcaggcaattcaagcttttcattatccaaaatcaaatccttggtagctatttgttgcagcagaacagggtatttgctgacagggagcagcagatggagagttttcattcagtcgtcatttctcaaagaaaagaggagttggacaatgccactacaaaaatagagcgattgagtttgcaaatggaggcagagaatggcgcaatggagcaagccaaaaaggaaatggatgaaggattgcggaagtaccagaatgagcaagttgcaagggctgtcttttccgttctcagtgctatagctcagatcgggcttgcattcatcacgggcggtgcaacggctcctggagctgtggcgtcagcggcgcaagctgtgagcatagcaggtcaggccgcacgagctcttgaaaaggtggtgaaaattttagagcagttggaggctgtgatggaggttgtgactgctgtgaaggagcttgtggattcattggaacagataggtcatattgtggaggcaccggtgatgccagagatgccctcagaggcggactggtccatttttgtgaacgagatcgaggcagtggcagagcagatgccgacggaagtcgcagaggtgccggcgtggaaggccaagtgcaagaatgttgctgcattgggtcgggagatgagcatcacggcagcatacatttctcagctccagtacgacatatgggtgcaaggcatgctgcgggaaatcgctcaaagccaggctgacaagctggcggcgattcaacccgtggaccttaccaactatttggaaatggtaacacagatggatatgcggacttcaaggatgctgctagggctcgtcaacatacttcgcattcagaatgcagcgctcatgtacgagtaccttctcacaccgacgcagctcacagcatggccattgtccatggatactgtggggaccttgcttatccagcaggagagttctgcactgataggattagctcagctaggccccccctctgattacacgagcacgcacgtggtgaaagacatacctgtgagcttgctgcttgatggtggtgattgggagttcgagatccctgtgcaagatggcaccacctttccttccagctggtctcgcgtccgcattcggcacttggagatgcactttgtgcaggccagcggtgacgagcagcagcagattatccaccagcccgccactcaaactggctccgtttacatcctcctgcagggctccactatcttccatgaccgcagaagagatgaggtgatgacctttgaggcagctgttcctctcaactaccattacgggtaccgcctcgacactggcgaaaccactgttacaaatgtaccctcggaacattttgccaacacattcatgcagatgacacccttcactcgctggagacttcgtctctctgcatctgctgcagagaatgcaggattagcctttcccacagcaacagctccggactccactacccagattgtcatcactttccatgtttcggccattaggcaaattgattggcggcacgacgagtag

SEQ ID NO: 918 - DNA, 2433 bp, Deparia acrostichoides
  source 1..2433: mol_type = other DNA
atggccgacatcgattacagtgtgctgtacaaggatgtgaaccagatcagcatcaggctagagaagatggacttctcggaggtgatggcagtgcatcgtatgttcgtccggatggacgatctggatgtgagctccggcaccggactgttggtgggagcggagaaggtgaagcgcctgtatgtgtttgcggatgtggtagagctaccgtccaaacaagtgcggctgccgggctccgacatgatcgtcatactgtgccgcatctttgtccgaaatggccgccataacatggagctgtttctgccttccatgaacatgagcatggtcgcagctggcaacgggagcattcggggagcgaacctgaccactacaatgttgtcatcgtcatccaatgctttgcagttcaagcttcaaagcggttcaatgacatcggctgtgcggctcaaagatgtggatgtagctgccgcactcacctgcgatgtgcaggctgcgtcggcgtcgatgcccctaactgtcatgacaaccggcacgtcgcctggcaacatctgggttcttggcatgactacagccatcgtcgttccagagagtgccgtggctgtcatcactgatgccaatattctgttgggcatgcaggtcaccgtgctcattgctgagctagtcaagactgcccacaactcagatgttgtcatagctgctatcactaggcatgtggaatggttgaaccacctcttggttcaggcgcatgcagctgcccccaatgaggacattgtcgcactcttatatcgtacacaagctttcattaaactgcaaagagaaggcttagtagttccgcggttgcaatatcgcatgtacaaaaacctcattgatcgaatggtgcaagtagctcagaactatgaccaagacttcaagcaattgaaactgtatctggagcaaaataaaatacttgggagctatttgttagagcaaaacaaggcgttcgctgcaaaggaaaaggatatggatgcttttcactcccaaatcattgctctaaggacgactgagctaaataacaccattgagaggatggatgcgttaagcaaacaaatggatgaagagaatgcagcaatggagcaagccaaaaaggacatggatgcaggcctggtagagtaccaaaacaaacaagttgcaaatgccctctttgctgtcttgggtgccattgctagtattggtctggcatttgcgactggtggggcaactgctcccggagctgtggctgctgcaggagcagccgtgaccgcggctgggaaggcagctgagggattgaagaaagtactagagattcttgaaggcttacaagtggtgatggaggttgtggctgccataaaagagctggtagaatctctacaggggatagggcagctagtggatgcccctgagatgccagatctgccttcgaatgcggattgggagatttttgtgaatgaagtggaggcagtggcagagcagatgccaacagaggtgacacaggtgcctgcctggaaggccaagtgcaagaatgtggcagctttaggccgagagatgagcacaatggcggcacacattgcagagctgcagtaccagatacaggtccaagagatgttgcgcgagatcgcacaaaagcaggcagataggctgtcttccatcacgcccgcagacttgacgaactacctggagatggtgtcacaaatggacatgcgaacaactcgcatgttgttggagctgattcgagtgctatacatccagaatgcagcattgcagtatgagtatctacagacacccgccccattgagcgcatggcctgtggacatgcaaacggtgtgggccttgcttgtacaacaagagactacggccattactgggttgctggagctgggggcgccttctgacttcacacaagaatatgtagtgaaagatatccctgtgcgcttgttgctagagggacaagactgggagtttgagctgccagttatgaatgcagatttcccctccacttggtctcgagtgcgcatccaccatgtggacatgcaatttgatgctgcaggcacgcctgatgtgcatgtacccacaaccaagagtggagaggtgtacatgctcctccaaagttctcgcttcttcgatgaccgtgccaagcgtgaaaatgagtttatcagctatcaggcaggcacgggcctattctaccagtatgcctaccgcctggccaccggcgaggccaccgtcaccaacatccccactgaggagtatgccaatactttcatgcgcctcgcacccttcacgcgttggcgacttcgtctctcttcctctgctgtcgaaaaccagggtatcgcatttcccacagccacatctgcagatgacaccacccaaatcaaaatcaccttctatgtctctgctattaggcgtataagcacgagaacaatataa

SEQ ID NO: 919 - DNA, 2433 bp, Deparia acrostichoides
  source 1..2433: mol_type = other DNA
atggccgacatcgattacagtgtgctgtacaaggatgtgaaccagatcagcatcaggctagagaagatggacttctcggaggtgatggcagtgcatcgtatgttcgtccggatggacgatctggatgtgagctccggcaccggactgttggtgggagcggagaaggtgaagcgcctgtatgtgtttgcggatgtggtagagctaccgtccaaacaagtgcggctgccgggctccgacatgatcgtcatactgtgccgcatctttgtccgaaatggccgccataacatggagctgtttctgccttccatgaacatgagcatggtcgcagctggcaacgggagcattcggggagcgaacctgaccactacaatgttgtcatcgtcatccaatgctttgcagttcaagcttcaaagcggttcaatgacatcggctgtgcggctcaaagatgtggatgtagctgccgcactcacctgcgatgtgcaggctgcgtcggcgtcgatgcccctaactgtcatgacaaccggcacgtcgcctggcaacatctgggttcttggcatgactacagccatcgtcgttccagagagtgccgtggctgtcatcactgatgccaatattctgttgggcatgcaggtcaccgtgctcattgctgagctagtcaagactgcccacaactcagatgttgtcatagctgctatcactaggcatgtggaatggttgaaccacctcttggttcaggcgcatgcagctgcccccaatgaggacattgtcgcactcttatatcgtacacaagctttcattaaactgcaaagagaaggcttagtagttccgcggttgcaatatcgcatgtacaaaaacctcattgatcgaatggtgcaagtagctcagaactatgaccaagacttcaagcaattgaaactgtatctggagcaaaataaaatacttgggagctatttgttagagcaaaacaaggcgttcgctgcaaaggaaaaggatatggatgcttttcactcccaaatcattgctctaaggacgactgagctaaataacaccattgagaggatggatgcgttaagcaaacaaatggatgaagagaatgcagcaatggagcaagccaaaaaggacatggatgcaggcctggtagagtaccaaaacaaacaagttgcaaatgccctctttgctgtcttgggtgccattgctagtattggtctggcatttgcgactggtggggcaactgctcccggagctgtggctgctgcaggagcagccgtgaccgcggctgggaaggcagctgagggattgaagaaagtactagagattcttgaaggcttacaagtggtgatggaggttgtggctgccataaaagagctggtagaatctctacaggggatagggcagctagtggatgcccctgagatgccagatctgccttcgaatgcggattgggagatttttgtgaatgaagttgaggcagtggcagagcagatgccaacagaggtgacacaggtgcctgcctggaaggccaagtgcaagaatgtggcagctttaggccgagagatgagcacaatggcggcacacattgcagagctgcagtaccagatacaggtccaagagatgttgcgcgagatcgcacaaaagcaggcagataggctgtcttccatcacgcccgcagacttgacgaactacctggagatggtgtcacaaatggacatgcgaacaactcgcatgttgttggagctgattcgagtgctatacatccagaatgcagcattgcagtatgagtatctacagacacccgccccattgagcgcatggcctgtggacatgcaaacggtgtgggccttgcttgtacaacaagagactacggccattactgggttgctggagctgggggcgccttctgacttcacacaagaatatgtagtgaaagatatccctgtgcgcttgttgctagagggacaagactgggagtttgagctgccagttataaatgcagatttcccctccacttggtctcgagtgcgcatccaccatgtggacatgcaatttgatgctgcaggcacgcctgatgtgcatgtacccacaaccaagagtggagaggtgtacatgctcctccaaagttctcgcttcttcgatgaccgtgccaagcgtgaaaatgagtttatcagctatcaggcaggcacgggcctattctaccagtatgcctaccgcctggccaccggcgaggccaccgtcaccaacatccccactgaggagtatgccaatactttcatgcgcctcgcacccttcacgcgttggcgacttcgtctctcttcctctgctgtcgaaaaccagggtatcgcatttcccacagccacatctgcagatgacaccacccaaatcaaaatcaccttctatgtctctgctattaggcgtataagcacgagaacaatataa

SEQ ID NO: 920 - DNA, 2601 bp, Arachnoides simplicolor variegata
  source 1..2601: mol_type = other DNA
atggagtacagcaatctctaccgtgacgtgaatacgctgagcttgtcgctgcagagaacggagctatcggaggtgatggtagtccaccgcatgcacgtgaagctagacgagctacacgtgcaaacgccagcaggcagcgagagggtgcagcggctgtacgtggtggcggacgtggtggagctgccgtttgggagcgtgagcttgccgtgcaaggcgtcactggtcatcctctgccgcgtcctctacatgccccactcaggccttcctctgtcgccgatctgccacctttatctgcccaacatgagcgtgcgtgtggtgtacgggccgtctgggatggaagtctatcccatggcaacagacggcagcgcggtcgccgtgtatatccacgccgatcgggtgatctggcggcaggatgactgggcagtggtgaggttgatgagcttgcaaataacaggcccggagagcacattctctgctccacatctgccggagccagtgcaggccttcaccgcgttgacgaatgtcatcatggatattgggcagcgcatccctgcttctgcatcggacttgcagcggtctgatgagattgaactgctgactcggtttggacttggagaccagcttcgagtagacttcccgggcagcagctggagcatcgctatggtgaacccctctgctacattcaacatctttccgattccgcacgcgcagcctgtcattcgagaggtgctgaccgatcctcatgttatcattggcctgcaaatgaacatgctcactgccgagctcgtccaggctgcccacaatgctcccctactgatcaatgctgtcaccagacatgtggaatggctcaacaaaattctagttgaggcattgccggttgcctctgacagcgaagatcttctagcactgttatttcgcacagaaacctatctgaagatggctgcagagtctcgtcccgtggtcccccggttacaataccacatgtacagaaacctcatccacagtatggtgcaggtggctcaagcttatgacaatgaatttcaacgactcaagctctttattgcacagaacgagatccttggcagctacttgttagaacagaatagggctcttgccagaagggaggaggaaatgagctcttatcactcccaagtggtgtctctgaggagaaccgagcttaacaactgcttagaaaggatggaccagttaagcgtgcagatggaaaacgagaataaagcaatggaggaagctaaagatgagatggataaagctcttgaggcacatgagagaagagaacttgcaagagctctctttgctgttcttggagcaatagcaacagttgccctcacttttgcgactggtggcgctgcggcaccactggctgtggcagcagctgggcaggcagtgacagcagcaggagcattagcacggggtttgcagagggtggttgaaattttagaaggcttgcaagctctcatggatcttgtggtgatcataagagagcttgtggaaaatttgcagagcattggccagctcattgacgcccccgagatgcaagaaatgccatcaaatgcagactggctgatttttgtgaacgaagtagaggctgtagccgagcaaatgccagcggaggtggttggatcggtggcagtgtggaaggccaaatgcagaaatgtagccgtgctgggccaggagatgtgtaccatggcagcacacattgcagagttgcaacaacagataaagctggaagagctgctgcaagagatagcaaagcgccaagcagatagattactgggtatatctgctgcagatttatcaagcttcacagagatgcttacgcagatagagatgcgtactactcggttgctggttcagctcatcaagttgttgcacatccagaacgtagcaataaattatgaatatctgtttcctgccaaaggacaacttagctcatggccagtgacaatgcatacagtgtggcagatgctcctgcagcaagagtcatcagctatcatgggtttgctgaccttggggacatccacggattttgcaaggacatatgttgtccaagacataccagtcggattactggttgatggttttgattggcagttcgcaatccctgtaatggacgattctttggcctttcccattggtttctctcgcgtgcgcatacgccatgttgagctcaaattctctgcaactgatagtgatgggtctgtgattgttcaccagcctcaaactgacaatgggttcatttatattctcttacagagtgcccagtccttctctgatcgcagagaaaggcaggcgatggactatgaggcaagcatgggacttgcctacccctatgcgtacaacctcaccacaggagttcctactctcaccaacattccgtcagagcagtatgccaacactttcatgcaaatgactcccttcactgggtggcgacttcgcctctcttcctctgctcaggagaataggggacttacattccccacagcagcttctcctgatgattctactcaaatttcaatcacatttcatatcaccgctattcgtgctatagatgtccgcagcatgggtgatgaggggcagtag

SEQ ID NO: 921 - DNA, 2601 bp, Arachnoides simplicolor variegata
  source 1..2601: mol_type = other DNA
atggagtacagcaatctctaccgtgacgtgaatacgctgagcttgtcgctgcagagaacggagctatcggaggtgatggtagtccaccgcatgcacgtgaagctagacgagctacacgtgcaaacgccagcaggcagcgagagggtgcagcggctgtacgtggtggcggacgtggtggagctgccgtttgggagcgtgagcttgccgtgcaaggcgtcactggtcatcctctgccgcgtcctctacatgccccactcaggccttcctctgtcgccgatctgccacctttatctgcccaacatgagcgtgcgtgtggtgtacgggccgtctgggatggaagtctatcccatggcaacagacggcagcgcggtcgccgtgtatatccacgccgatcgggtgatctggcggcaggatgactgggcagtggtgaggttgatgagcttgcaaataacaggcccggagagcacattctctgctccacatctgccggagccagtgcaggccttcaccgcgttgacgaatgtcatcatggatattgggcagcgcatccctgcttctgcatcggacttgcagcggtctgatgagattgaactgctgactcggtttggacttggagaccagcttcgagtagacttcccgggcagcagctggagcatcgctatggtgaacccctctgctacattcaacatctttccgattccgcacgcgcagcctgtcattcgagaggtgctgaccgatcctcatgttatcattggcctgcaaatgaacatgctcactgccgagctcgtccaggctgcccacaatgctcccctactgatcaatgctgtcaccagacatgtggaatggctcaacaaaattctagttgaggcattgccggttgcctctgacagcgaagatcttctagcactgttatttcgcacagaaacctatctgaagatggctgcagagtctcgtcccgtggtcccccggttacaataccacatgtacagaaacctcatccacagtatggtgcaggtggctcaagcttatgacaatgaatttcaacgactcaagctctttattgcacagaacgagatccttggcagctacttgttagaacagaatagggctcttgccagaagggaggaggaaatgagctcttatcactcccaagtggtgtctctgaggagaaccgagcttaacaactgcttagaaaggatggaccagttaagcgtgcagatggaaaacgagaataaagcaatggaggaagctaaagatgagatggataaagctcttgaggcacatgagagaagagaacttgcaagagctctctttgctgttcttggagcaatagcaacagttgccctcacttttgcgactggtggcgctgcggcaccactggctgtggcagcagctgggcaggcagtgacagcagcaggagcattagcacggggtttgcagagggtggttgaaattttagaaggcttgcaagctctcatggatcttgtggtgatcataagagagcttgtggaaaatttgcagagcattggccagctcattgacgcccccgagatgcaagaaatgccatcaaatgcagactggctgatttttgtgaacgaagtagaggctgtagccgagcaaatgccagcggaggtggttggatcggtggcagtgtggaaggccaaatgcagaaatgtagccgtgctgggccaggagatgtgtaccatggcagcacacattgcagagttgcaacaacagataaagctggaagagctgctgcaagagatagcaaagcgccaagcagatagattactgggtatatctgctgcagatttatcaagcttcacagagatgcttacgcagatagatatgcgtactactcggttgctggttcagctcatcaagttgttgcacatccagaacgtagcaataaattatgaatatctgtttcctgccaaaggacaacttagctcatggccagtgacaatgcatacagtgtggcagatgctcctgcagcaagagtcatcagctatcatgggtttgctgaccttggggacatccacggattttgcaaggacatatgttgtccaagacataccagtcggattactggttgatggttttgattggcagttcgcaatccctgtaatggacgattctttggcctttcccattggtttctctcgcgtgcgcatacgccatgttgagctcaaattctctgcaactgatagtgatgggtctgtgattgttcaccagcctcaaactgacaatgggttcatttatattctcttacagagtgcccagtccttctctgatcgcagagaaaggcaggcgatggactatgaggcaagcatgggacttgcctacccctatgcgtacaacctcaccacaggagttcctactctcaccaacattccgtcagagcagtatgccaacactttcatgcaaatgactcccttcactgggtggcgacttcgcctctcttcctctgctcaggagaataggggacttacattccccacagcagcttctcctgatgattctactcaaatttcaatcacatttcatatcaccgctattcgtgctatagatgtccgcagcatgggtgatgaggggcagtag

SEQ ID NO: 922 - DNA, 2599 bp, Arachnoides simplicolor variegata
  source 1..2599: mol_type = other DNA
atggagtacagcaatctctaccgtgacgtgaatacgctgagcttgtcgctgcagagaacggagctatcggaggtgatggtagtccaccgcatgcacgtgaagctagacgagctacacgtgcaaacgccagcaggcagcgagagggtgcagcggctgtacgtggtggcggacgtggtggagctgccgtttgggagcgtgagcttgccgtgcaaggcgtcactggtcatcctctgccgcgtcctctacatgccccactcaggccttcctctgtcgccgatctgccacctttatctgcccaacatgagcgtgcgtgtggtgtacgggccgtctgggatggaagtctatcccatggcaacagacggcagcgcggtcgccgtgtatatccacgccgatcgggtgatctggcggcaggatgactgggcagtggtgaggttgatgagcttgcaaataacaggcccggagagcacattctctgctccacatctgccggagccagtgcaggccttcaccgcgttgacgaatgtcatcatggatattgggcagcgcatccctgcttctgcatcggacttgcagcggtctgatgagattgaactgctgactcggtttggacttggagaccagcttcgagtagacttcccgggcagcagctggagcatcgctatggtgaacccctctgctacattcaacatctttccgattccgcacgcgcagcctgtcattcgagaggtgctgaccgatcctcatgttatcattggcctgcaaatgaacatgctcactgccgagctcgtccaggctgcccacaatgctcccctactgatcaatgctgtcaccagacatgtggaatggctcaacaaaattctagttgaggcattgccggttgcctctgacagcgaagatcttctagcactgttatttcgcacagaaacctatctgaagatggctgcagagtctcgtcccgtggtcccccggttacaataccacatgtacagaaacctcatccacagtatggtgcaggtggctcaagcttatgacaatgaatttcaacgactcaagctctttattgcacagaacgagatccttggcagctacttgttagaacagaatagggctcttgccagaagggaggaggaaatgagctcttatcactcccaagtggtgtctctgaggagaaccgagcttaacaactgcttagaaaggatggaccagttaagcgtgcagatggaaaacgagaataaagcaatggaggaagctaaagatgagatggataaagctcttgaggcacatgagagaagagaacttgcaagagctctctttgctgttcttggagcaatagcaacagttgccctcacttttgcgactggtggcgctgcggcaccactggctgtggcagcagctgggcaggcagtgacagcagcaggagcattagcacggggtttgcagagggtggttgaaattttagaaggcttgcaagctctcatggatcttgtggtgatcataagagagcttgtggaaaatttgcagagcattggccagctcattgacgcccccgagatgcaagaaatgccatcaaatgcagactggctgatttttgtgaacgaagtagaggctgtagccgagcaaatgccagcggaggtggttggatcggtggcagtgtggaaggccaaatgcagaaatgtagccgtgctgggccaggagatgtgtaccatggcagcacacattgcagagttgcaacaacagataaagctggaagagctgctgcaagagatagcaaagcgccaagcagatagattactgggtatatctgctgcagatttatcaagcttcacagagatgcttacgcagatagatatgcgtactactcggttgctggttcagctcatcaagttgttgcacatccagaacgtagcaataaattatgaatatctgtttcctgccaaaggacaacttagctcatggccagtgacaatgcatacagtgtggcagatgctcctgcagcaagagtcatcagctatcatgggtttgctgaccttggggccatccacggattttgcaaggacatgttgtccaagacataccagtcggattactggttgatggttttgattggcagttcgcaatccctgtaatggacgattctttggcctttcccattggtttctctcgcgtgcgcatacgccatgttgagctcaaattctctgcaactgatagtgatgggtctgtgattgttcaccagcctcaaactgacaatgggttcatttatattctcttacagagtgcccagtccttctctgatcgcagagaaaggcaggcgatggactatgaggcaagcatgggacttgcctacccctatgcgtacaacctcaccacaggagttcctactctcaccaacattccgtcagagcagtatgccaacactttcatgcaaatgactcccttcactgggtggcgacttcgcctctcttcctctgctcaggagaataggggacttacattccccacagcagcttctcctgatgattctactcaaatttcaatcacatttcatatcaccgctattcgtgctatagatgtccgcagcatgggtgatgaggggcagtag

SEQ ID NO: 923 - DNA, 2601 bp, Arachnoides simplicolor variegata
  source 1..2601: mol_type = other DNA
atggagtacagcaatctctaccgtgacgtgaatacgctgagcttgtcgctgcagagaacggagctatcggaggtgatggtagtccaccgcatgcacgtgaagctagacgagctacacgtgcaaacgccagcaggcagcgagagggtgcagcggctgtacgtggtggcggacgtggtggagctgccgtttgggagcgtgagcttgccgtgcaaggcgtcactggtcatcctctgccgcgtcctctacatgccccactcaggccttcctctgtcgccgatctgccacctttatctgcccaacatgagcgtgcgtgtggtgtacgggccgtctgggatggaagtctatcccatggcaacagacggcagcgcggtcgccgtgtatatccacgccgatcgggtgatctggcggcaggatgactgggcagtggtgaggttgatgagcttgcaaataacaggcccggagagcacattctctgctccacatctgccggagccagtgcaggccttcaccgcgttgacgaatgtcatcatggatattgggcagcgcatccctgcttctgcatcggacttgcagcggtctgatgagattgaactgctgactcggtttggacttggagaccagcttcgagtagacttcccgggcagcagctggagcatcgctatggtgaacccctctgctacattcaacatctttccgattccgcacgcgcagcctgtcattcgagaggtgctgaccgatcctcatgttatcattggcctgcaaatgaacatgctcactgccgagctcgtccaggctgcccacaatgctcccctactgatcaatgctgtcaccagacatgtggaatggctcaacaaaattctagttgaggcattgccggttgcctctgacagcgaagatcttctagcactgttatttcgcacagaaacctatctgaagatggctgcagagtctcgtcccgtggtcccccggttacaataccacatgtacagaaacctcatccacagtatggtgcaggtggctcaagcttatgacaatgaatttcaacgactcaagctctttattgcacagaacgagatccttggcagctacttgttagaacagaatagggctcttgccagaagggaggaggaaatgagctcttatcactcccaagtggtgtctctgaggagaaccgagcttaacaactgcttagaaaggatggaccagttaagcgtgcagatggaaaacgagaataaagcaatggaggaagctaaagatgagatggataaagctcttgaggcacatgagagaagagaacttgcaagagctctctttgctgttcttggagcaatagcaacagttgccctcacttttgcgactggtggcgctgcggcaccactggctgtggcagcagctgggcaggcagtgacagcagcaggagcattagcacggggtttgcagagggtggttgaaattttagaaggcttgcaagctctcatggatcttgtggtgatcataagagagcttgtggaaaatttgcagagcattggccagctcattgacgcccccgagatgcaagaaatgccatcaaatgcagactggctgatttttgtgaacgaagtagaggctgtagccgagcaaatgccagcggaggtggttggatcggtggcagtgtggaaggccaaatgcagaaatgtagccgtgctgggccaggagatgtgtaccatggcagcacacattgcagagttgcaacaacagataaagctggaagagctgctgcaagagatagcaaagcgccaagcagatagattactgggtatatctgctgcagatttatcaagcttcacagagatgcttacgcagatagatatgcgtactactcggttgctggttcagctcatcaagttgttgcacatccagaacgtagcaataaattatgaatatctgtttcctgccaaaggacaacttagctcatggccagtgacaatgcatacagtgtggcagatgctcctgcagcaagagtcatcagctatcatgggtttgctgaccttggggccatccacggattttgcaaggacatatgttgtccaagacataccagtcggattactggttgatggttttgattggcagttcgcaatccctgtaatggacgattctttggcctttcccattggtttctctcgcgtgcgcatacgccatgttgagctcaaattctctgcaactgatagtgatgggtctgtgattgttcaccagcctcaaactgacaatgggttcatttatattctcttacagagtgcccagtccttctctgatcgcagagaaaggcaggcgatggactatgaggcaagcatgggacttgcctacccctatgcgtacaacctcaccacaggagttcctactctcaccaacattccgtcagagcagtatgccaacactttcatgcaaatgactcccttcactgggtggcgacttcgcctctcttcctctgctcaggagaataggggacttacattccccacagcagcttctcctgatgattctactcaaatttcaatcacatttcatatcaccgctattcgtgctatagatgtccgcagcatgggtgatgaggggcagtag

SEQ ID NO: 924 - DNA, 2580 bp, Osmunda regalis
  source 1..2580: mol_type = other DNA
atgtggtgtggttcatgtgaagatccacagcctccatctcccatacaaccggaagatataagcatggcttccgtggattacggccagatataccagaatgtgaaccaaataacgaggccagtggcgaccaaggagtgctcggaggtgatggccatccatcggatgtatttgcagctggacaacttggacgtggagctcctcacgaaagccaacactgtgaagcagctggttgtgtttgtggacgtggtggaaattgagagcgacaatgtgaagctgccggggtcgagtcaagtcaccatagtgtgtcgcatccttcatgtcaagaaaaacaacgttgccctcaattttgacttcttggggccaactaagtgcaatggccggtctacgagaggttatgcacgcattatggacgatagccctgtatttgagttgtccatatacgcgcaacagctggtgggcgatgacggtgctatgttgcgggtgcggcatccggtgaccgttgcgacgatcgagaatggtcatgactatgaggtgagagaggggaacatggagtggcagatttggccttactctagtaccggcctctccagcgccgcacgctctcatgaattgaagaccatcggggaccatggaagggagaggacgtggctaataatcgaacaagaatggtctcgtttcattgctgtcgtcccagacttgattccactgagatggcttacggattccaacgtcctgctcggcatggaagccactttgctaactgcggaactgattttgagctaccaaacagatgcacaagcaactgttgctgctgcactgcagcatgtggaatggctcaatacccagttgcttcaggtggtggaggagacagacttggaggcaactggtgaacgtctgctctcacttttgttccgcgcacagtcgctcttgaagttgccagtggacgggagccatactttaatagtgccacggctagaatatggcctataccgtgatctgattaacagaatgaccgatgtggcggagaagtacaacagtgaattcatgcaaatgaaccttttcattcaacaaaatgagatccttggtacctatttgctggaacagaacaaagtgtttgctcagaaggagaaggatatggaggttttccattcatcgcttgtgactcttaaacaacaggagttgacatctgccaagagcaaaatggctcagttggaaactcaactgacggaacagaaagcagcaatggaccaagccaagaaagagatggatgaaggtctgcggagatacaatgatgcgcaggttgcgaatgctttctttgcggtgatattaggtgtagcttcaataggtctagctatcctcaccggcggtgcaactgcgggagcagctgtggcaggagcagctcaggctgtgtcagcagtgagtgcagttgcaaacacgctaggaagggtcgtggacattttggaggggttgcaaaaggtgatggaggtattggaagcaataaacgacctaacgacctcactcgcggctatcaatgaaatggtggaagcacctcaaatgcccgacatgccatcggaagctgattgggccatattcgaaaacgagatcgaggcagtggcagagagcatgcccactgaggtctcagaggtgcccacatggaaggctaagtgcaagaatgtggccgccgtgtgccgagagatcaccacaactgcaacctacattgggcagctccaatacgacctgctcgtgcaaagcatgcagcagcagattgccatgaggcaagccgaacgtctcgaggcaatccagccggcggacctgacaaattatctagaaatggctacagagctggatatgcgaactagccggatgctactgggtttgcttaaggtgttgacactacaaaatggggcactcttgtaccacttcttgctgccgcccaaaccattcacaggctgggtgagcatggacattgtgaggaacgcgctagtgcaacatgatatcgaagctgtgatagctcgaaccgagttgggcccctcgacggacttcacgcggacgtatgtggtggaaggcatacccgtcaccttgctcctcgaaggcgacgactggaacttcaccatccccgtccatgactccgcatttccgtccaattggtctcgggtgcggatccggtacctggaaatgaggtttagcagcagtgaggaggtccaccagcccaccaccaacacgggcgaagtgtacattctgctgcaagctgctcgcatgttcgacgatcggctcaagggcgatgtgctacactaccaggcagcagtgccattgcagtaccagtacgcatacgacctcaacaccggcgaaaccacccagagtaatctgccctcagaggaacacaccggtgagtacatgcggatgacacccttcactcgctggagactccgcctctcggcctcagcatacgagaaccaaggactggcattccccacagctacagccttggacagcaccacccagatctccatcacgttcttccttactgccatcaggcaaatcgatacacgcttcacagagctcatggatgagccgcagtag

SEQ ID NO: 925 - DNA, 2847 bp, Nephrolepis biserata
  source 1..2847: mol_type = other DNA
atgctcactcacttgatctttcctttgtgtgtgcagggtggcaacgttgcttgcaaagagaggtatacactgctcccttataattttctatgtttacacaggcaggatagtatggcaagttctgcttctgttggtgttgctgattggagggagttgtatagagatctgaaccaagtgagtgataggatgaggttcgatcaacttgagttctcagaattgatggtgattcaccgcatgcacatcaaggtgtcagagttgaatatgggacatctggagggctcagaaaaggtcaagcgtttctatgtgtttgctgacgtggttgaatacgacttggtcaaatccgacggtgaagtagcacatctcccggggtccatctccgttgtatttatatgccgtgagtggcatgttcacagccctattaatgccagacgggatagagatcctccaatgtatgtcttcagtgactgggtgttgaggctacggcttccgcacatgagatggcatttgaacgagcctcgtgaagacatgcatcgcatagacccagaaactatgcaagagttttcggaaccttccttctgcgtgtatgcagatgacgtaagcgttgcctactataattaccaagatggagagtcctcgtgggaccccgctcttggattccctctacctcaactactagcactatgtccagttgtgttctatgataatttgagcgctcccataccagatcaccttcttgtcacgcgcatgcagatgagcacgactacagttacgcgttcgagcactcgagtacggtttactatgcgttacgaggacaaccaagatgtcgtgaaagacattgcaacaatgccacaaggcacccgtgtcatatttaaacgggaagggcgtcttagcgatttcgtggttggtggatcagaaggatcgatcacaagcttagacgatggtgcagatggtagccgacttatgcctgcatggtctcttctcagacaggactcaaagttcccaatcgaacttctaacagatccaaatattttaccggcgatgcaaactagtatgctcattggggagcttgtggaggtcggtaacccttcagttgccatcactgaagttgtgcacaagcatgtgaaatggctcaacaaactcttgcttcaggtgatcgaggaaaagaacggcaaggacgtggaagactacatcgagctgtcgtttcgtgcacagtatgtaataaaggaagtgggaaggatacgtggccttgtagtgcctcagttgcaatacgacgtgtacagcaatctcatcaatcggatggctcaggtagcggaaagctatgaccaggcgctcaggcaatttcggctctccattcagaacacgaagatttctggtggctttttgttggagcaaaatcgggcctttgctgacaaggagaaggacatggatgttctctattctgaaattatcacacaaaggcaaattgaactggacaacacccttcaaaagttggaacgcctgagtttacaaatggagactcaacaagcagacatggagcaggcacaagcagatatggaagcagggctgcggcaatttcaaaataggcaagctgccagggctctttttgccgtacttggtgctatagcggcggtcgctcttaccgttgtcacgggtggggcagctgctcctctggctgtgggagcagccgggactgccgtgacagtagcaggaagtgtggtagcagggcttaagagagtggtagatgttttgaagcgcttacaagctgtaatggaggttgtggcacttatcaaagaactgttcgacaccctgcaagatttgaatcaggctgtggagctgccggatatgccagacatgccattacagtcggactggctcatctttgtgaatgaggtcgaggcagtggccgagggcatgccaacagaagtgtcagaggtggtggcgtggaaaactaagtgcaagaacgtagcggttctgggtcaggagatgatgacttcagcagcctacatttcacagctgcagtatgacattatggtgcagaatatgctgcagcagattgcgaggaagcaagccgatcggttgtcagccatccagctaccagacctgaaaaactttacagagatggtggtgcagatggacatgaggaccacgcgcctcctggtggctctcatcaaggtggtgtacatccagaatgcagccctcatgtatcaatacctatccgcacccacacccgtgtctgcatggcccgtgaacatggacacggtgtggcgcatgcttgtgcagcatgaacaactcgcaatccaaggtttagtgaggctggggcctgcttttgatattgtgcgcacatacgtagtgaagggcattcccgtaagcctgctcctggatggagatgactacgagtttgagattccagcggaggaccccctcacatttccattgccattgtcgcgtgtgcgcatccatcacctggagatgaagtttgtgcaaggggtggcacaggtccacatccccaccacagccaccggcgccatatacatccttctgcaaggatcgcgcaacttccacgaccgcaatgaaggcgagataatgcatttcgaggcggccaccgcactggattaccactatgcctaccatctggagacaggggagaccaacgtcaccaacctgccctctgccgagtttctcagaaccttcatgcgcatgacacccttcagtaactggaggctccgtttgtctgcctctgcggaggagaaccaagggctggctttccccactgccacatccgccgatgccaccactcaaatcgccatcactttccacatttctgcaattaggcgggtctctctctag

SEQ ID NO: 926 - DNA, 3240 bp, Gymnocarpium dryopteris
  source 1..3240: mol_type = other DNA
atgggggagaatgtggaggacaatgagtatcactatgactatgaggctgcatacaaggagatagatgagcattttaggacagttgtaaaaagggagtgctcggaggagatgatggttgtgcatcgcatgtacttgcggctagatgatatagatgcggggcatcttccgaacccggagggggtgaagataatgcttgtgtatgcagatgtagtggatgtggagagtgaacggctggagtttgcagggagatttgaagtgtacatcatgtgccgcctgttgagagtgaaagcaaggcatggcagcactttggatttcaagtacttcacgcctgttggagcatgcatgagcatactccaattaccagcttggactatggatgaacaactgcacatctgggcacaacaactgatgggtggtgagagtgagcaggagctggcaatcagagcggagttttgggcttacgaggaaactacacgtgtacaagttgtaggggaatggcaagtgaagccgtatggaagagaatgcacaaaggatgagagtgtagtccgcacatgccaaactctccagaagcctggcttcacttaccggcctgatgaatctgacttccaagaagcccaaagtgaagttgaagaccttctttgcactgggcctcgctggtttaaagaatgtttccatcttgtgtctccagaacccatctctgtaaactggagcgatgaactctgcgaaactattgaaggcgctttctcctctctcgagcttgccctctcgagaacctgcgtcatcccttctgctgccttcctccacctccaatggctcactcgacacttggctcagatgaggtctacaacaagtgtgagctctacaacaagtgcaattatcaatcgcttggaattacttctgtcccatgccaagactcttttgaacaacgttacttatttaaaactacatacaagaattatcggtgaggttgtatatgctgaggtatataagaatgtgagaagggcattttccactagggagtgttcggagctgatgaccatgcaacgcatgtattttctccttgatgacttggatgcaggcctctttaagaacccacaggtagtgaaggagctgattgtgtatgcagatattgtggagattggctctaccactttgaggattttggggtccacaagagtcgtcatcatgtgccgcctcctgagcttaaaaggatctcaagaattctcaccttttatcctcaattttccacacatttctcatgatcatacttcatcttgtttatctctttatgtttctccagccatgcttttgaatcagcttcctacatcgggagtgtacatctatgcacaagaattgattataagcaaccccttaaatcctaccacatgtttttccacatccttccaatcctcaattcctgtggagatcctaggtgattccaatgtgcttcctctgatccaagctgctctgcatagtttaacctaccaattaagcgcaacagcaaatgtgaagactgctcaagatcatctacaatggcttatcacccatctggctcaggtacgcctttgtcatgggatgcaggaagagaacaagactaatctgcatgaatcctcattgaatgatctgcgtgatcttctcctccacgcacagttactcttgaaaatgtccaatgaaagcgaaagtgtaatagttccaagcttgcgttatgagaaatatagtaagttgattgagaggatggctaccgcagcatcagattacaactcccaattcctacaagtggattattttattcggcaaaatcaaattacaggtgattacttactgcaacagaataagatatttattgagaaggaaagagatgttgaatatttccactctttgcttactgagtgtaaaaaaaccgagttggatgctgcaattagcaaaatgaagaacttaaaggagcaattgactacccaggaggcagaaatgaaccaagccaaaaaagacatgcacacaggtctgattgcaaatgctgtgtttactctatttgaagctgtgtttgaattggggctagctgcatccacacttgccaatgcagcaacaacccttcgtagatttaaagaggttgtcgataaagcaaaaaaggcaaaggacactttagaggagatagtgaagatggtaaagatggtggaaaacatttgttcatacttcgatgcactaatggatgtctatacacttgacattgagaagctacagcaaggtcttgtgatgcctgaaatgccatcaaaagcagattgggaaatctttgagaacgaattaacagcagtggcagagaacatgcccttggagatatcacaggtacccatttggaaggccaagtgcaagaatgtggcttctgtgttccgagagttaatcacaacggcctcttacatgaagcagcttgaatatgacatccttgtggaggacatggaagcaaaaattgctgcaaagcaagcggagcgtttggacatgacacttgcagacttgaagaattatgaggagatggcgatgcaactagaaatgcgaaccaccaggatcctttcgcacctgctcaaggcgttgaaggtacagagtggggctctcttgtaccactacctgctgccaccaaggtcaatcacaaactggatggacatggatgcggtgacgaatgcattgctaagttacgaggagttggcggtggagggtctggagcagttggggactcctactgactacagacgggagtatgttgtacctgacatacccatagctttgctaatgaatggacaagactggatcttcacaataccaatagatgactacttagtgttccctgcccattggagcacagtgcgcataaagtatgtggagatgaggttcaatgaggggcattatcttccttctaccagctctggtcaagtttacttcttgctgcaagcttctcgcatgtttcaggatcggaagaagggcgaagtgctcaactatgaggccgcgattcctttggattaccagtttgcctacgagctcgaaaccggtcacccaactgtcaccaacaagcctacttatgaatataagggaacttttatgaggatgacgcctttcactcaatggagacttcgtctttctgcctctgcacatgagaaccaaggactctccttccccacagccagagaagcaaacagcacgacccagatctccatcaccttttaccttacagctatccgtgaaaagagtatctag

SEQ ID NO: 927 - DNA, 2589 bp, Astrolepis sinuata Jo Levy
  source 1..2589: mol_type = other DNA
atggccgtgccggattactatcgcatatacaagaacgtgaatcaagtgacacgcgcggtggcgagcacgcagtgctcggaggtgatgagcatccaccgcatgtatttcaagctggacatgttggaagtggagctgctgacagatgccagaacggtgaagcagctggtagttttcgcggacgtggtggagattgaaaaagacaaggtgcagctgccagcgtccagcaaagtcacggtcgtgtgccgcattctgcttgtgaagaaggagaacgtggcgctggagttcacgctcttagcgccagttgcatgcgaaagtgggataattgagggaagtgtggcccgtattaggagcagcagcccagctggggttggattatccatatacgcgcaacaagttgtgtgcagcacagcgtcagctctgctgcaggttgagcatccggtgacagtacaaaggggttatcctgaatcttgcagccacccactccaagtcatccccgggaacatccactggcgcattcggatcacttcttctcatgatggcaacctctccactgctgaacgctcccaggagatccgggcaccgatgcatggcggaataacctggagcgtaatgcctacggagtggtcttcgtttatatctttgctccagcctgtcttaattcccctggacagcatggccgatcccaatgttatactcggcatgcaatcctccttgcttattgcagagttagttctaagctaccaaacacatgaaccagacacggtttctgctgcactccagcatgtgcaatggcttggcacaaacttgctccaggtggtggctgatcaaaactctggccagcagctgctggacaggccggatcagacaacccaggagcttctcacactcttggcccgttcacaatctctccttaagatgccacttgatggaagccagactttgattgttccacggcttgagtatggccaatatcgtaatctcatcagcagtatggctaccgtagctgaagcgtataactctgaattcaaacaagtagatcttttcattcagcaaaatcagattcttggcagctatttgttacagcagaacaaggcatttgctcagcgggagaaggacatggaggctttctatggattggtcgtggcacgcaaacacgaggagttgagggctgcgcaggacaggatgaacgaattaaatgctcaactaacacaacagagggaagcaatggatgaagccaaagaaaaaatggacaaaggtttgcagaaatacaaagacgaacaagttgcaaaggcgttctttgcggttctgaaaggcgtgctggaagttgggctagccatcttcaccggtggagcaactgcaggggcagcagtaaaaggggcatctgaggctgttattgcagtgagtgatctggcaggaatgcttcaaactgtgctgaatattatggaggggatggagaaggtgatggaggtcttgaatgcaatgaaggacctcaccacttcgctttctgaaatcaatcaaatggtggaggcacctaagatgcctctcatgccatccaaaatggagtgggacatcttcgagaatgagatggaggaagtggcagaaagcatgccgaccgaggtgatagaggcgaggacatggaagacgaagtgcaggaatgtggcggcggtttgcagggagatctgcacaactgctgcctacattgggcagctggaatatgacctctttgtgaacagcagtcaggaggagattgcaaaaaagcacgcagaacggctggaagtgattcaaccggcggatctcaaaaattatttggagatggcgacgcagctcgatatgcgaacgagccgcatgttattaggattattgaaggtgttgaccttacagaatggggcattgctatttcattacctgctgccgcccaagccgtttaccggatgggtgaccatggatatggtgaggaatgccttagtacaacatgaagctgatgccttggcagctagggagaggttggggccttctacggacttcacgcagacatatgtggtgagcgacataccgctctcgctcctcctggatggggatgattggatattcaccatcccaacggatgaccccacgttccccctgagctggtctcgcgtgcgcatccgctacttggagatgaagttcagtggtggtgaggactaccacaagcccactaccaacagcggccaggtctatattttgctccaagctgcacgcatcttccaagatcgccttttcaatgaggttctccattatgaggctgctatgccactgcgatatcagtacgcatatgacttgaaatctggtgaaacaactctttctaataggccttcacagcaacatgacggtgaatttatgcagatgacacccttctgccaatggaggctacgcctctctgcttcagccattgagaatctaggccttgcgttcccaacagctgagtgtgcttctggggacttgacttaccagagaccattcacccaaatctccatcattttttaccttactgccataagaaggattgacacaaggcatgagcgttcgagggatggatttgttgagagttga

SEQ ID NO: 928 - DNA, 2517 bp, Pyrrosia lingua
  source 1..2517: mol_type = other DNA
atgggaaatgcaatgacaggtcctagctacgaggagatctacaagaatgcaaactacatacataggtcggtggctacgccagtctgctcagaggtgatgtccgtgagcaggatgcatatggctgtctcggagctggatgtgaagcggttgaagaaccctgagattgtgaaggagctgtatgtgttcgcagacgtactcttttgggacgatggatcaaccatatggcctggggcagaggtcgtgttcgtcatgagccgtgtaactgtacttgacatggcaattctcgctagcaccggcgctgcagaagctgcagcgaatgtgactgcgagcattagagtaccctggctaaatgtgcctagcaccactttcaatatcagccaccaggaccagatagtgtcacccttttcctgctccatcaggccaaagcacagtactactagggccggtactgcgcctgctggtttcttcctgcacacgcaacagctcatggatacatcacatgccactaaacctgccatctcagattttgttcttaagcttgagactcgggaaggctcgtttgcgcatgacgagggtgtagatgaaagcatacgggaaatttttaacgatgctaggcttttttgggccgatgtgaatctaaccttattgtgggctatggaggccactgtgcttgttgcggagctgatactgacctacatgtcttcctctacgcgcacagtcaaagaagcaaccttgcacttgaaatggatgaaccagctgctaatccatgcacttgaaacgaaggatggtgagccggatgcggctgtggagcgcctcttcaatactctcgcgctgcaggtgccactcatcttgaacaatccatcattagttgctggcttagtggtgccacgcctgcaatacagtacttatcggaatctcatcactacgatggctcatttggcggatggctacacccgagaattccagcagttggttatgttcatggatcaaaatgaggttctgggcactttcttgcttgagcaaaaccaggcatttgctgcaaaagagagggacatggaaagctttcacgcagagcttcacaaagtaaagacaaatgacttgattcaagctctagccaccttggagcaactcgaagttcttatgacagagatgaatgccgagatggaacaagcacagcaagacatggaggaaggtctcaggaggtttcggaatcggcaagttgctcgggcggtcttctcagtgttcggttcgatagttgcaatcgcttcagcattcttcactggtggtgcaaccgcaggggcggctgtgtcatcaacaaagaatgcagttaatcaggtggtggaaatgagaagctcattggagagaattgtggaaaccttggaaaagttgcttctggtgtctgactttctagtggccatgaaagagctcataaatgctgtgcaaaatatccacgatgcggcagctaacgtacctgcgcttccagacatgccaacagatgccgaatggacaatctttgagaatgagatagaggcagtggcagcagagatgcctgaagaggtgtctgaggtgttggtatggaagaccaaatgtaagaatatggccgctatagggcgtgagatggtgactatggcaacagtcatttcgcagctgcagtatgacgtcaggatgcatgaacttctgcaggagatatcaaggaatcaagcagagcgcctggaagcgattaggccagtggacgtccgcaactaccaagaaatggctacacagttggaaatgcgaaccacacaaatactgctgggccttctggaggttctttcactacaaaatgccgctatacagtaccaatatctgatgccaccaagccctgtcatcatgaccaataccatcattaccatgtctgatgtatggacagagctcttgcagcaggaagctgctgccatcgtagccctttcagagctggggttcccaacggaccgcaaggtgacatacacggtgaaaggtatacctgttggtgtgcttctggatggccaagattgggacttctccatttccacagaagatggtgatcactttccatatggatggagccgtgtgcgcatctcgtatgtggagctgaagtttggctcagcaagtttgggatcgacggcacaggcggagaatgaagagattcatgagcccgtcactgacaccggggaggtgtacatggtcctgcggggagaacaaacatttgtggatcgcaaaaggggagagaaggtaaggtatgaggctgtggcgcccgttaaataccagtatgcctaccagcttgagacaggcgaaacgacagaacagaatcgtcccacagaagagttcacaaaccacttcatgaggatgacacccttcacgcgctggaagctgcgaatacctggctccgccagagagaatcgaggattagcatttcccaaagctactgccatggatgcaaccacccaaatcaccatccatttttatgtgaccgccatcagggcagcagattggcactaa

SEQ ID NO: 929 - DNA, 2517 bp, Pyrrosia lingua
  source 1..2517: mol_type = other DNA
atgggaaatgcaatgacaggtcctagctacgaggagatctacaagaatgcaaactacatacataggtcggtggctacgccagtctgctcagaggtgatgtccgtgagcaggatgcatatggctgtctcggagctggatgtgaagcggttgaagaaccctgagattgtgaaggagctgtatgtgttcgcagacgtactcttttgggacgatggatcaaccatatggcctggggcagaggtcgtgttcgtcatgagccgtgtaactgtacttgacatggcaattctcgctagcaccggcgctgcagaagctgcagcgaatgtgactgcgagcattagagtaccctggctaaatgtgcctagcaccactttcaatatcagccaccaggaccagatagtgtcacccttttcctgctccatcaggccaaagcacagtactactagggccggtactgcgcctgctggtttcttcctgcacacgcaacagctcatggatacatcacatgccactaaacctgccatctcagattttgttcttaagcttgagactcgggaaggctcgtttgcgcatgacgagggtgtagatgaaagcatacgggaaatttttaacgatgctaggcttttttgggccgatgtgaatctaaccttattgtgggctatggaggccactgtgcttgttgcggagctgatactgacctacatgtcttcctctacgcgcacagtcaaagaagcaaccttgcacttgaaatggatgaaccagctgctaatccatgcacttgaaacgaaggatggtgagccggatgcggctgtggagcgcctcttcaatactctcgcgctgcaggtgccactcatcttgaacaatccatcattagttgctggcttagtggtgccacgcctgcaatacagtacttatcggaatctcatcactacgatggctcatttggcggatggctacacccgagaattccagcagttggttatgttcatggatcaaaatgaggttctgggcactttcttgcttgagcaaaaccaggcatttgctgcaaaagagagggacatggaaagctttcacgcagagcttcacaaagtaaagacaaatgacttgattcaagctctagccaccttggagcaactcgaagttcttatgacagagatgaatgccgagatggaacaagcacagcaagacatggaggaaggtctcaggaggtttcggaatcggcaagttgctcgggcggtcttctcagtgttcggttcgatagttgcaatcgcttcagcattcttcactggtggtgcaaccgcaggggcggctgtgtcatcaacaaagaatgcagttaatcaggtggtggaaatgagaagctcattggagagaattgtggaaaccttggaaaagttgcttctggtgtctgactttctagtggccatgaaagagctcataaatgctgtgcaaaatatccacgatgcggcagctaacgtacctgcgcttccagacatgccaacagatgccgaatggacaatctttgagaatgagatagaggcagtggcagcagagatgcctgaagaggtgtctgaggtgttggtatggaagaccaaatgtaagaatatggccgctatagggcgtgagatggtgactatggcaacagtcatttcgcagctgcagtatgacgtcaggatgcatgaacttctgcaggagatatcaaggaatcaagcagagcgcctggaagcgattaggccagtggacgtccgcaactaccaagaaatggctacacagttagaaatgcgaaccacgcaaatactgctgggccttctggaggttctttcactacaaaatgccgctatacagtaccaatatctgatgccaccaagccctgtcatcatgaacaataccataattaccatgtctgatgtatggacagagctcttgcagcaggaagctgctgccatcgtagccctttcagagctggggttcccaacggaccgcaaggtgacatacacggtgaaaggtatacctgttagtgtgcttctggatggccaagattgggacttctccatttccacagaagatggtgatcactttccatatggatggagccgtgtgcgcatctcatatgtggagctgaagtttggctcagcaagtttgggattgacggcacaggcggagaatgaagagattcatgagcccgtcactaacacaggggaggtgtacatggttctgcggggagaacaaacatttgtggatcgcaaaaggggagagaaggtaaggtatgaggctgtggcgcccattaaataccagtatgcctaccagcttgagacaggcgaaacgacagaacagaatcgtcccacagaagagttcacaaaccacttcatgaggatgacacccttcacgcgctggaagctgcgaatacctggctccgccagagagaatcgaggattagcatttcccaaagctactgccatggatgcaaccacccaaatcaccatccatttttatgtgaccgccatcagggcagcagattggcactaa

SEQ ID NO: 930 - DNA, 2517 bp, Pyrrosia lingua
  source 1..2517: mol_type = other DNA
atgggaaatgcaatgacaggtcctagctacgaggagatctacaagaatgcaaactacatacataggtcggtggctacgccagtctgctcagaggtgatgtccgtgagcaggatgcatatggctgtctcggagctggatgtgaagcggttgaagaaccctgagattgtgaaggagctgtatgtgttcgcagacgtactcttttgggacgatggatcaaccatatggcctggggcagaggtcgtgttcgtcatgagccgtgtaactgtacttgacatggcaattctcgctagcaccggcgctgcagaagctgcagcgaatgtgactgcgagcattagagtaccctggctaaatgtgcctagcaccactttcaatatcagccaccaggaccagatagtgtcacccttttcctgctccatcaggccaaagcacagtactactagggccggtactgcgcctgctggtttcttcctgcacacgcaacagctcatggatacatcacatgccactaaacctgccatctcagattttgttcttaagcttgagactcgggaaggctcgtttgcgcatgacgagggtgtagatgaaagcatacgggaaatttttaacgatgctaggcttttttgggccgatgtgaatctaaccttattgtgggctatggaggccactgtgcttgttgcggagctgatactgacctacatgtcttcctctacgcgcacagtcaaagaagcaaccttgcacttgaaatggatgaaccagctgctaatccatgcacttcaaacgaaggatggtgagccggatgcggctgtggagcgcctcttcaatactctcgcgctgcaggtgccactcatcttgaacaatccatcattagttgctggcttagtggtgccacgcctgcaatacagtacttatcggaatctcatcactacgatggctcatttggcagatggctacacccgagaattccagcagttggttatgttcatggatcaaaatgaggttctgggcactttcttgcttgagcaaaaccaggcatttgctgcaaaagagagggacatggaaagctttcacgcagagcttcacaaagtaaagacaaatgacttgattcaagctctagccaccttggagcaactcgaagttcttatgacagagatgaatgccgagatggaacaagcacagcaagacatggaggaaggtctcaggaggtttcggaatcggcaagttgctcgggcggtcttctcagtgttcggttcgatagttgcaatcgcttcagcattcttcactggtggtgcaaccgcaggggcggctgtgtcatcaacaaagaatgcagttaatcaggtggtggaaatgagaagctcattggagagaattgtggaaaccttggaaaagttgcttctggtgtctgactttctagtggccatgaaagagctcataaatgctgtgcaaaatatccacgatgcggcagctaacgtacctgcgtttccagacatgccaacagatgccgaatggacaatctttgagaatgagatagaggcagtggcagcagagatgcctgaagaggtgtctgaggtgttggtatggaagaccaaatgtaagaatatggccgctatagggcgtgagatggtgactatggcaacagtcatttcgcagctgcagtatgacgtcaggatgcatgaacttctgcaggagatatcaaggaatcaagcagagcgcctggaggcgattaggccagtggacgtccgcaactaccaagaaatggctacacagttggaaatgcgaaccacacaaatactgctgggccttctggaggttctttcactacaaaatgccgctatacagtaccaatatctgatgccaccaagccctgtcatcatgaccaataccatcattaccatgtctgatgtatggacagagctcttgcagcaggaagctgctgccatcgtagccctttcagagctggggttcccaacggaccgcaaggtgacatacacggtgaaaggtatacctgttggtgtgcttctggatggccaagattgggacttctccatttccacagaagatggtgatcactttccatatggatggagccgtgtgcgcatctcgtatgtggagctgaagtttggctcagcaagtttgggatcgacggcacaggcggagaatgaagagattcatgagcccgtcactgacaccggggaggtgtacatggtcctgcggggagaacaaacatttgtggatcgcaaaaggggagagaaggtaaggtatgaggctgtggcgcccgttaaataccagtatgcctaccagcttgagacaggcgaaacgacagaacagaatcgtcccacagaagagttcacaaaccacttcatgaggatgacacccttcacgcgctggaagctgcgaatacctggctccgccagagagaatcgaggattagcatttcccaaagctactgccatggatgcaaccacccaaatcaccatccatttttatgtgaccgccatcagggcagcagattggcactaa

SEQ ID NO: 931 - DNA, 2394 bp, Pyrrosia polydactyla
  source 1..2394: mol_type = other DNA
atgattgactatggggctgtctacgcgcatgtaaacgaggtagggaggaggctgggcacaggcaaggtgaagtgcactagggtgttggcaaagcagggaatggtggtgaggctggatgagttgacgatggaagagctgcaagatgcaggcgctgtcgagcaactagtggtgtttgcagacgtagtagaggtgtctggtacccgcgtgaacttcccaggcatgttcgtcaccatagtatgccgcatccttgtcctcctccacgactcgctacgactggacctcacacttcattcctcctggaacactgtaactaacaatccggcccgattctcgctctttgctcaaaaaatagtctcggcttcggcgccggcccgcaaaagtgtcgtgttgcagattaggcggccaagggaggacgtttcgcgagttagtacggctgcgtctgatcaagctaccgcctggggtgacatcatattcgtcgtgcaaacagtgcctgatgcaatgcgtggacgcttggaaacgggggtattggcttcgcttggagtactcgtcgaccccaacaccatcatgggcatacaatccaccctactcatcgcggagctcatcttaagctaccgaacagaccttccagaaactgtccaagctgcagtggagcacgcccaatggattaatagcaccctgcttgcggtggaggcctccttggattcttctgcagaagaagcactcgagctgagaaatctgttggctcgggctcagatgcttctgaagtttcccacagacggaagccagagtctcatcgtaccacgcttagaatatagagggtaccaaagcctgatcgaccgaatggtcacggtggcagagtcctacaatagcgagcttggccagttcatgttattcattacacagactcagatcctccagaacgaattgctagcgagaaccaaggcctttgctgcgaaggagagagacgtggcagatctgcaaagcagcattgtgtctcgcaaaagaactgagctacttcaggctgagcagacaatgacgcgcctaaacgacatactcaaccaacaagccaaagacatggagcaagctcaaaacgacatggaacagggtctgaaagaatacaaggacagagaggttgcacgggcctttataggtgtactagttgcggtggtggagattggggtaagctttgccactggcggactaacggcgctatcaggtattaggagatccatcaatgcagcaaaagggttggcccgcctggcagagatgataaaagcagtgataaaagtgatggagcagctagctgaagcgatggaggtgttgaatgccgtgagagcgttgatggatgcagtagcagtgtccaaggatatctttgaagcgccagagatgccagatatgccaaccatagcagagtgggacatctttgagaatgagattgaactggtggcagagggtatgccagaggaagtatcggaggcacgagtatggagggttaagtgcaagaatgtggcagcagtgtgccgagagatcacaagaacgggagtgtacataacccaattgcaatatgaactgtttgtgcaagcacaacaagaggcaattgcaacgaggcacgccgagcgtctagagcagattgaggctgtgaacttggacaactacatggagatggcaacgcagatcgacatgcggaccactcggctcctcttgggcctcctcaagatgatgtccatacagaatgcagcccttcagtatcactatctgctccctaaagagcccttcactggctggccaaccatcgatattgtgaggcggaggctcatagagaaggaaatccaagctgtacatggtctcgaggcactaggtatgagcaccaactttacaaggaccttcaacgttgaggacatctctgttgatctactcttgtctggggaggattggaacttcactctctcaccagagtccaactcgccttttcctctcactttctctcgggttcgaattcgtcatgtagaaatgaaatttgcgaataccctcgcccctcggccaagcaccacctctggcaagctctacattttgcttcaaggctctcgcacatttcaagatcgtcgaactcaccaggtacttgaatatgatgcggctgtcccaatcgcatatccgtatgcatataacctctccactggtgaaacaactctaagcaatgagccctctcaagacgatgcaagcaacctcctcttctttcgaatgacacccttcactaattggagacttcgcctctcttcctctgcctttgaaaacgaaggtctcttattccccgaaggtagtactaccactagtatggagatcacattccatattacagccattagatccattgacactcgtctacaagtctcttga

SEQ ID NO: 932 - DNA, 2394 bp, Pyrrosia polydactyla
  source 1..2394: mol_type = other DNA
atgattgactatggggctgtctacgcgcatgtaaacgaggtagggaggaggctgggcacaggcaaggtgaagtgcactagggtgttggcaaagcagggaatggtggtgaggctggatgagttgacgatggaagagctgcaagatgcaggcgctgtcgagcaactagtggtgtttgcagacgtagtagaggtgtctggtacccgcgtgaacttcccaggcatgttcgtcaccatagtatgccgcatccttgtcctcctccacgactcgctacgactggacctcacacttcattcctcctggaacactgtaactaacaatccggcccgattctcgctctttgctcaaaaagtagtctcggcttcggcgccggcccgcaaaagtgtcgtgttgcagattaggcggccaagggaggacgtttcgcgagttagtacggctgcgtctgatcaagccaccgcctggggtgacatcatattcgtcgtgcaaacagtgcctgatgcaatgcgtggacgcttggaaacgggggtattggcttcgcttggagtactcgtcgaccccaacaccatcatgggcatacaatccaccctactaatcgcggagctcatcttaagctaccgaacagaccttccagaaactgtccaagctgcagtggagcacgcccaatggattaatagcaccctgcttgcggtggaggcctccttggattcttctgcagaagaagccctcgagctgagaaatctgttggctcgggctcagatgcttctgaagtttcccacagacggaagccagagtctcatcgtaccacgcttagaatatagagggtaccaaagcctgatcgaccgaatggtcacggtggcagagtcctacaatagcgagcttggccagttcatgttattcattacacagactcagatcctccagaacgaattgctagcgagaaccaaggcctttgctgcgaaggagagagacgtggcagatctgcaaagcagcattgtgtctcgcaaaagaactgagctacttcaggctgagcagacaatgacgcgcctaaacgacatactcaaccaacaagccaaagacatggagcaagctcaaaacgacatggaacagggtctgaaagaatacaaggacagagaggttgcacgggcctttataggtgtactagttgcggtggtggagattggggtaagctttgccactggcggactaacggcgctatcaggtattaggagatccatcaatgcagcaaaagggttggcccgcctggcagagatgataaaagcagtgataaaagtgatggagcagctagctgaagcgatggaggtgttgaatgccgtgagagcgttgatggatgcagtagcagtgtccaaggagatctttgaagcgccagagatgccagatatgccaaccatagcagagtgggacatctttgagaatgagattgaactggtggcagagggtatgccagaggaagtatcggaggcacgagtatggagggttaagtgcaagaatgtggcagcagtgtgccgagagatcacaagaacgggagtgtacataacccaattgcaatatgaactgtttgtgcaagcacaacaagaggcaattgcaacgaggcacgccgagcgtctagagcagattgaggctgtgaacttggacaactacatggagatggcaacgcagatcgacatgcggaccactcggctcctcttgggcctcctcaagatgatgtccatacagaatgcagcccttcagtatcactatctgctccctaaagagcccttcactggctggccaaccatcgatattgtgaggcggaggctcatagagaaggaaatccaagctgtacatggtctcgaggcactaggtatgagcaccaactttacaaggaccttcaacgttgaggacatctctgttgatctactcttgtctggggaggattggaacttcactctctcaccagagtccaactcgccttttcctctcactttctctcgggttcgaattcgtcatgtagaaatgaaatttgcgaataccctcgcccctcggccaagcaccacctctggcaagctctacattttgcttcaaggctctcgcacatttcaagatcgtcgaactcaccaggtacttgaatatgatgcggctgtcccaatcgcatatccgtatgcatataacctctccagtggtgaaacaactctaagcaatgagccctctcaagacgatgcaagcaacctcctcttctttcgaatgacacccttcactaattggagacttcgcctctcttcctctgcctttgaaaacgaaggtctcttattccccgaaggtagtactaccactagtatggagatcacattccatattacagccattagatccattgacactcgtctacaagtctcttga

SEQ ID NO: 933 - DNA, 2394 bp, Pyrrosia polydactyla
  source 1..2394: mol_type = other DNA
atgattgactatggggctgtctacgcgcatgtaaacgaggtagggaggaggctgggcacaggcaaggtgaagtgcactagggtgttggcaaagcagggaatggtggtgaggctggatgagttgacgatggaagagctgcaagatgcaggcgctgtcgagcaactagtggtgtttgcagacgtagtagaggtgtctggtacccgcgtgaacttcccaggcatgttcgtcaccatagtatgccgcatccttgtcctcctccacgactcgctacgactggacctcacacttcattcctcctggaacactgtaactaacaatccggcccgattctcgctctttgctcaaaaaatagtctcggcttcggcgccggcccgcaaaagtgtcgtgttgcagattaggcggccaagggaggacgtttcgcgagttagtacggctgcgtctgatcaagctaccgcctggggtgacatcatattcgtcgtgcaaacagtgcctgatgcaatgcgtggacgcttggaaacgggggtattggcttcgcttggagtactcgtcgaccccaacaccatcatgggcatacaatccaccctactcatcgcggagctcatcttaagctaccgaacagaccttccagaaactgtccaagctgcagtggagcacgcccaatggattaatagcaccctgcttgcggtggaggcctccttggattcttctgcagaagaagcactcgagctgagaaatctgttggctcgggctcagatgcttctgaagtttcccacagacggaagccagagtctcatcgtaccacgcttagaatatagagggtaccaaagcctgatcgaccgaatggtcacggtggcagagtcctacaatagcgagcttggccagttcatgttattcattacacagactcagatcctccagaacgaattgctagcgagaaccaaggcctttgctgcgaaggagagagacgtggcagatctgcaaagcagcattgtgtctcgcaaaagaactgagctacttcaggctgagcagacaatgacgcgcctaaacgacatactcaaccaacaagccaaagacatggagcaagctcaaaacgacatggaacatggtctgaaagaatacaaggacagagaggttgcacgggcctttataggtgtactagttgcggtggtggagattggggtaagctttgccactggcggactaacggcgctatcaggtattaggagatccatcaatgcagcaaaagggttggcccgcctggcagagatgataaaagcagtgataaaagtgatggagcagctagctgaagcgatggaggtgttgaatgccgtgagagcgttgatggatgcagtagcagtgtccaaggatatctttgaagcgccagagatgccagatatgccaaccatagcagagtgggacatctttgagaatgagattgaactggtggcagagggtatgccagaggaagtatcggaggcacgagtatggagggttaagtgcaagaatgtggcagcagtgtgccgagagatcacaagaacgggagtgtacataacccaattgcaatatgaactgtttgtgcaagcacaacaagaggcaattgcaacgaggcacgccgagcgtctagagcagattgaggctgtgaacttggacaactacatggagatggcaacgcagatcgacatgcggaccactcggctcctcttgggcctcctcaagatgatgtccatacagaatgcagcccttcagtatcactatctgctccctaaagagcccttcactggctggccaaccatcgatattgtgaggcggaggctcatagagaaggaaatccaagctgtacatggtctcgaggcactaggtatgagcaccaactttacaaggaccttcaacgttgaggacatctctgttgatctactcttgtctggggaggattggaacttcactctctcaccagagtccaactcgccttttcctctcactttctctcgggttcgaattcgtcatgtagaaatgaaatttgcgaataccctcgcccctcggccaagcaccacctctggcaagctctacattttgcttcaaggctctcgcacatttcaagatcgtcgaactcaccaggtacttgaatatgatgcggctgtcccaatcgcatatccgtatgcatataacctctccactggtgaaacaactctaagcaatgagccctctcaagacgatgcaagcaacctcctcttctttcgaatgacacccttcactaattggagacttcgcctctcttcctctgcctttgaaaacgaaggtctcttattccccgaaggtagtactaccactagtatggagatcacattccatattacagccattagatccattgacactcgtctacaagtctcttga

SEQ ID NO: 934 - DNA, 2640 bp, Pyrrosia polydactyla
  source 1..2640: mol_type = other DNA
atggagtacagtgacttgtatgcggatgtgaaccaggtgagcttgaggttccagtcgacggagttctctgaggtgatggtggtccatcgcatgcacgtgcagctgcaggaccttgacatgacgacggggcccagcctcctcatgtttccgggcagtgagaaggtgcagcgactgtacatagtggcggacgtcgttgagctgccttccaatgccaccaatatgcggcttccggccacggtgtccgctgtcatcctatgccgcgtgctgtatgtgcaagatgtcaactcaccattcctcacctgcggcctccatttccccttgatgcgcatgcgcttggtggagacgaaagagggcttggtcaaggtctttccggttccggcatctgcctcctctgtagatgctgacatcggtctctacatccacgcggatcgtgtcatctatcggcaggacacctctaaccttgaccctcttcagcctctgcaattgagggtgatcggaggctcgacattctccaccgatgtgcgccccggctggacaacaaaccttgaggtgttttccctcattttatggctcaccctgtccaaggggcagcgcattcctgccacagagtctgatttgcagagatccgacgagtttgagcttttgcccccgcctaccccagataaactcaacgtagtctttacctatcttgcacctggaaacatctctagtatgttggtggatgttgaagctggagctacatttaacttctttcgggtacccccggcggaccctgtccctacagaagttctcaccagcccttacatcatcctgggcctgcaaatgaacatgctcattgctgaacttgtcctggctgctcacaattctccgcgggtcatcggtgttgtcacgaagcatgtggaatggcttaacaagattctcaagcccaagcttggtttagcaaatgatgatatatcagcacttctgtttcgtgtgcaaagctttttgaagatggctaatcagcctcgttccgttgtaccacggttgcaataccacatgtacagtaaccttatcaaccgcatggtgcaagttgctcaggcttacgaccaagaattcaggcaactcaagctcttcattgtgcaaaaccagatcctcggcagctacttgctagaacaaaataaggcatttgcaagcaaggaaaaggatatgagtgcattccactctcaagtcgtgtccctgaggaggaccgagctcaacaatgctattgacagaatggaccaattgagtgcgcaaatggaaagggagaatgaagcgatggaccaagccaaagaggagatgatgcaagctattgaggactatcagcagcaacaagttgccaatgccctctttgctgtgcttggtgccatagccgctgtggcccttgcatttgcaacagctggtgcaaccgcaccgggggctgtggcagcagcgggggcagccgtgactgcggcagggagactggcagaaggcttgcaaaaagttgtcgaaatattggaaggcctgcaaaaagtgatggagattattggaattataagggatcttgtagagtcactgcagaatcttggtaaactagtcgatgcgccggagatgccagacatgccatcagatgcagactggctaatctttgtgaatgaggtggaagcagttgcggagcaaatgccagcagacgtggttggttcggtggctgtgtggaaggcgaaatgcaagaatgtggctgtgcttgggcaggagatgtgcaccacagcggcacacatcggggagttaacataccagattaaggtggaggaaatgttacaagagattgcagaacgacaagcaaacaggttggaggggatcacacccgccgacttgtcgagctacaccgaaatgctatcacagatagacatgcgcaccactcgcttgctgcttcaacttatcagggtgttgcatatccaaaatgcggcactcaagtatgagtacttgttcactgcaagcgggcaattgaattcatggccggtgagcatggatactgtttggagcatgctattgcaacacgagaattcggctctcgtaggcttgttagacctggggccatccactgatttcacacgcaccgttgtgctcaaagacgttcctgtcggactgttagtgagtggtagtgattggcaagttgtcatcccggtggaggattctgttgcctttcccattgggttttcacgtgtccgcatacgctatgtcgagctcaaattcgagcaaggcagcaatgatgatggcaccgtaatccaccagcctcgcaccaatggtgggttaatttacctgctgctacaaagctctcgtttcttcaaggatcggaagcgtagagagatacttgactacgaggcaagcatgggactggcatacgcctttgcatacaatctcaccaccggagtgcccactcttaccaatgtaccctcccaggagtttgccaacacgttcatgcgcatgacacccttcaacaattggcgacttcgactttccgcctccgccgaggagaatcggggattagtgtttcctacggccacttctccaggcgacaggacccagatcgcccttacctttcacattactgctattcgcgcaatagatacgcgagcagatgagtag

SEQ ID NO: 935 - DNA, 2640 bp, Pyrrosia polydactyla
  source 1..2640: mol_type = other DNA
atggagtacagtgacttgtatgcggatgtgaaccaggtgagcttgaggttccagtcgacggagttctctgaggtgatggtggtccatcgcatgcacgtgcagctgcaggaccttgacatgacgacggggcccagcctcctcatgtttccgggcagtgagaaggtgcagcgactgtacatagtggcggacgtcgttgagctgccttccaatgccaccaatatgcggcttccggccacggtgtccgctgtcatcctatgccgcgtgctgtatgtgcaagatgtcaactcaccattcctcacctgcggcctccatttccccttgatgcgcatgcgcttggtggagacgaaagagggcttggtcaaggtctttccggttccggcatctgcctcctctgtagatgctgacatcggtctctacatccacgcggatcgtgtcatctatcggcaggacacctctaaccttgaccctcttcagcctctgcaattgagggtgatcggaggctcgacattctccaccgatgtgcgccccggctggacaacaaaccttgaggtgttttccctcattttatggctcaccctgtccaaggggcagcgcattcctgccacagagtctgatttgcagagatccgacgagtttgagcttttgcccccgcctaccccagataaactcaacgtagtctttacctatcttgcacctggaaacatctctaatatgttggtggatgttgaagctggagctacatttaacttctttcgggtacccccggcggaccctgtccctacagaagttctcaccagcccttacatcatcctgggcctgcaaatgaacatgctcattgctgaacttgtcctggctgctcacaattctccgcgggtcatcggtgttgtcacgaagcatgtggaatggcttaacaagattctcaagcccaagcttggtttagcaaatgatgatatatcagcacttctgtttcgtgtgcaaagctttttgaagatggctaatcagcctcgttccgttgtaccacggttgcaataccacatgtacagtaaccttatcaaccgcatggtgcaagttgctcaggcttacgaccaagaattcaggcaactcaagctcttcattgtgcaaaaccagatcctcggcagctacttgctagaacaaaataaggcatttgcaagcaaggaaaaggatatgagtgcattccactctcaagtcgtgtccctgaggaggaccgagctcaacaatgctattgacagaatggaccaattgagtgcgcaaatggaaagggagaatgaagcgatggaccaagccaaagaggagatgatgcaagctattgaggactatcagcagcaacaagttgccaatgccctctttgctgtgcttggtgccatagccgctgtggcccttgcatttgcaacagctggtgcaaccgcaccgggggctgtggcagcagcgggggcagccgtgactgcggcagggagactggcagaaggcttgcaaaaagttgtcgaaatattggaaggcctgcaaaaagtgatggagattattggaattataagggatcttgtagagtcactgcagaatcttggtaaactagtcgatgcgccggagatgccagacatgccatcagatgcagactggctaatctttgtgaatgaggtggaagcagttgcggagcaaatgccagcagacgtggttggttcggtggctgtgtggaaggcgaaatgcaagaatgtggctgtgcttgggcaggagatgtgcaccacagcggcacacatcggggagttaacataccagattaaggtggaggaaatgttacaagagattgcagaacgacaagcaaacaggttggaggggatcacacccgccgacttgtcgagctacaccgaaatgctatcacagatagacatgcgcaccactcgcttgctgcttcaacttatcagggtgttgcatatccaaaatgcggcactcaagtatgagtacttgttcactgcaagcgggcaattgaattcatggccggtgagcatggatactgtttggagcatgctattgcaacacgagaattcggctctcgtaggcttgttagacctggggccatccactgatttcacacgcaccgttgtgctcaaagacgttcctgtcggactgttagtgagtggtagtgattggcaagttgtcatcccggtggaggattctgttgcctttcccattgggttttcacgtgtccgcatacgctatgtcgagctcaaattcgagcaaggcagcaatgatgatggcaccgtaatccaccagcctcgcaccaatggtgggttaatttacctgctgctacaaagctctcgtttcttcaaggatcggaagcgtagagagatacttgactacgaggcaagcatgggactggcatacgcctttgcatacaatctcaccaccggagtgcccactcttaccaatgtaccctcccaggagtttgccaacacgttcatgcgcatgacacccttcaacaattggcgacttcgactttccgcctccgccgaggagaatcggggattagtgtttcctacggccacttctccaggcgacaggacccagatcgcccttacctttcacattactgctattcgcgcaatagatacgcgagcagatgagtag

SEQ ID NO: 936 - DNA, 2607 bp, Microsorum punctatum Elkhorn
  source 1..2607: mol_type = other DNA
atggattacggcacgctttacagggatctgaaccagataagcatgccggtggctcaggtacagttctcagaggtgttggtgattcataggatgtatctgaggttatctgatttggatgtgggggagcttggcggagctgagggagtgaagagggtgtatgtgtttgcggacgtggtggaccttgcaccagaagaggcagcaccgaggcatcagacccaaatgccaggatcagtgaaggtgatcataatgtgtcgtctgcttcgatttccgttggacggggcaacggctgcaacgctccggctgcggttcttgaagatgcatgccacattgaaagagtttcaggtaaggtcggagataacagcagccgatggcgtgaagtggggaacgtacatacatgcggacgatgtgcagtactttccgcagagtggagctgctctcaatttttcgagactttgggtctgggcagatgactctattataacctcagcccatcacaatgtgctgaacgaacctgggagaatagtttcctctgctacatttctatgggcgcatggccaacccaatcatgcgcatgtgagcgcagaacccgggtggaattttcgtaatgggttttccctcgccacagtttccccaacggcatcgagtgttctagctcgccagtgttggaatctacccttcacaagtattcccgtcgaggtggtggtcgatcctaacatcttattgggcatgcagactaccgtccacattgtggagctagtcaagatatgttgtccgttaccagacgtagtgagcgctgttgcggagcacacagtttggctcaacaaagtcttgctcgaagtggtccagaacgagtctcagttgcaaggaaccgagtcctacaacgagtgccttgtgcttttgggtcgtgttcaatctgtgatgaagatcggaagatttgaggcagtagtgccccagctgcaatacagactgtatggtagtctcatcaatcaaatggcgcaaacagcacgaacctacgaccaagaattcaagcaattcaagctgttcattatccaaaaccaaatccttggcagctatttgctgcagcagaacaaggcatttgctgagagggagctgcagatggagagctttcattcagcggtcatttctcagagaggtcaggagctggacaatgccatcgcaaagatggaccggctgagtttgcaaatggaggaagagaatgaagcaatggagcaagcccaaaaggaaatggaagaaggattacgggagttccaaaataggcaagttgcaagggcactattttctgttcttacagcagtagctatgattgggcttgcatttgtaacggctggtgcaacggctcctggagctgtggcgtcggcgggtcgagctgtgagcgcagctggtcaggccgcacaaggtctgcgaagggtggtggagattctagaggggctggaggctgtgatggaggtcgtggctgctgtgaaggagcttgtgaattcattggagcaagtaggtcagatgatagacgcaccggtgatgcccgatatgccctcggaggcggactggtcaatctttgtgaacgaaatcgaggccgtggcagaggggatgccgacggaagtctccgaggttccggtgtggaaggccaagtgcaggaatgtggctgcactgggcagggagatgagcatcactgcagcacagatttctgagctccagtatgacatatgggtgcaaggcttgatgcgggatatggctcgaagccaggcagataggctggcgacgattcaacccgcagacctttccagctatttggagatggcaacacagatggatatgcggactacaaggatgttgttagggctcctcaacatactgcgaatccagaatgcggcactcatgtacgagtaccttctaacgcccacggagctcacagcatggcctctgggtatggatactgtggccaacttgctcatcgcgcaggagaatgctgcactgttgggactaactgagctggggccgtcatcgaatttcacaagcaggcatgtggtgaaaggcatacctgtgagcttgctgcttgatggcgaggattgggagttcgagatccctgcgcaaagtggcatgtccagcttccctttcagctggactcgtgtccggattcgacacctggagatgcactttgtgcaggaagcaagtgatggcggcgagattatccaccagcctgccacccagacagggacggtttacatcctcctgcagggctccactatattccatgaccgcagaagaaacgaggtgatgacctttcaggcagcggctccgctcaactaccattacgcataccgccttgacactggcgaagccactcttacgaatgagccctcggaacagtttgccaacacattcatgcagatgacacccttcactcgctggaggcttcgtctatctgcgtctgccaaagagaatgcgggattagcgtttcccacagctacagctcccgattccagtaccgagattgtcatcacattccatgttactgccattagacaaattgactggcggcaggaggaggtggcagcaaaggatgctagtgacagtattgtaagctcataa

SEQ ID NO: 937 - DNA, 2484 bp, Athyrium filix-femina frizelliae
  source 1..2484: mol_type = other DNA
atgatccacaaagtgagaattgctgctgctgttgattacgagtccatctacaagaatgcaaatgagatagcgagggtggtggggactgacaagatctcctgctccgaggtgatggcgtgccacagaatgtttgtgaggttggacacactgtcggtggagcagttggtgggctccagcaatgtgaagcagcttatcgtgtttgctgatgtggtggaaatccaggacagcagctttactctaccggggtccacccagattttcatagcatgccgcatcttggatgtgaaggccaacaaggacatagacctcaccctagactggcaagtggtgaacaatgccggtcagaccagcatccctcgatgcgccatctacgcgcaaaatatcgtctcctcctccagcactaaaagtggcactatccttctcaaggtgaaatatcagagaaacagttcttcggcgcctgtatattttgggcgagagttctcctacagtgccgcctccaccgccgtggttgatttcagcactgcccaggacaacttggagttaataaacaggaaaaattgggttgtgaatatcaatggtatggaatggtccgcttatgttgacttgcaatttgggttgccttcagttgaggagctggcagaatacaacatcctaacgggcttacaatctaccatacttatctcggagatgattctcaactatcgaacagatttgccagatactgtaacagctgcaattgcgcatgtacaatgggccaacctttgcttgcttccggtggtgggtatgacaaacctggagggagcttaccagttgccttcattactaggtcgtgcacaatcacttctcaaattaccaacagatggaagtcagagtttaatagtcccacgtctggaatatagtgggtacgagaaactcattgcgcaaatggttaccgttgtagaatcctataacaacgaattcgtgcaacttatcctttttattcagcaaaatcagatcatgggtgcctatctgctggagcaaaacaaggcctttgctgcaaaggagaaggatattgcagaattggagtccatgattttggatcgcaagaaacaagagatggataatgcctttcaaaaaatggaggccttaaataagcagctcgaacagcaagtggaagagatgaatcaggctaaagaggacatggatgctggtatccagaaatacaaggatgagcaggttgccaaggcattctttgctgtaatcaaaggtatcctaggtgtggctctagcaattgccactggtggtgcaacttcggcaggagcagtagcgggggcggtggatgcggtggggaaggtgagccaactcgcaaaagcgctgcagaaggtggtggacatcttgcaagggcttgaggaactggccgcgattttgagtgcaatcaaattgctgttggagtccctcgaagatctgaataagatggtggaagcgccggagatgccagagatgcccaccatggcagactgggacatctttgagaatgagatagaggcagtggctgaacagatgccagaggaggtcgctgaggtgcctgtgtggaaggccaagtgcaaaaatgtggctgccgtgtgcagagagatttccactactgcagcctacatcgggcagctcgaatacgatctcttcctccatggcaagcaacaagaaattgcagaagcacaagccaaacgcttagagagcattacgccagcgaaccttaccaattacctagagatggccacccagctggacatgcgcaccacccgccttttggtgggcttgctaaaaatgctaacggtacaaaatggagccctgcaatatcactacctgttaccacccaagccattcacggggtggccgaccatggatcgtatcagaagtacattggtgcagaatgagcacaatgccgtgttggcccttgagcagcttggcttttccacggacttcacaaaaacctacgtgctgagcgatgtaccagtgcacttgctcctctcaggtgaggactggatcttcaacataccagtagatgacccaacattcccgtcgaattggtcccgggtgcgcattgtgtacctcgagataaattttactggagatgaaggatcaactcactttcccagcaccaacacgggcgaggtctacttcctgctccaggcctcacgcatgtttcaggaccgacttgagggggaatacctaaaatatgaggctgccacacctttacagtatcagtatgcctatgtccttcaaactggtgaaacaactgtgcccaataagccctcgcaggaagaggatggtagattcctgcgcatgacaccctttactagctggaggcttcgcctttctgcctctgccgacgaaaataaaggcctctcattcccctcagctaacgccttggacagcaccacccagatctccatcactttctacctcactgccatcagaaaaatcaatactcgtgagggaatcgaatag

SEQ ID NO: 938 - DNA, 2682 bp, Coniogramme venusta Ping Wu
  source 1..2682: mol_type = other DNA
atggctgctgcggcggagcggcggttgccggactatagagagctgtacaaggatttgaaccagataagtgagagggtgaggttcgatcagatggagttttcggaggtgatggtgatacaccgcatgtttataaggatggaggagttggacttggggcacctcgaaggagccgagaaggtgaagcgattgtatgtgtttgcagatgtggtggaggtggcagaaggtgttagttggggcctctggaggaacggcccattagcgagattgcctggttcgattgcgatagtcatagtgtgtcgcgtgctatgggtgagtggtgttcttgctagcctagggaataattccatgatgctacagcttccacacatgaagttgcgtgtgctggagatcacaccaagtaaactggaaatacatcgtgtagacactagtacagaagctgcagattatcctgccctctgcatacatgccagtgtcttggagtgctccaatatccgtttggcgaatgatagagacaggcctcctttcccggttcgtctctttggtttcaggcccgaactacgtgacccaaaccttgtcttctcttccgtgcctaggtctgttgttgatcaccaccctatttatgagttctatgtattctctgtaatccgcgatgtttttcctcgactgcccctcccagaatcagtctcagtccagcttgactcagccactcgcggggccaattggtatagtcttcaaacaggctccataagtcaagttggaagtgtttcattgaatcgctttccggctgaagaagaagagctggagccggcgttctcactaatgaagaccaaaatcccggctgccatactcacagatcctaacattttactcaccattcaaactagtctgcttatcgcagagttagttgaggtgactcacccttcagcggagacagtggctgctgtagccaagcatgccgaatgggtcaatgagctcttgcttcaggcgacatcagaagcggcagggacttcatctcatgaagagtacctcgcactcttattccgttcacagtacctcataaaagtgaggggcaggacacgcagccttgtagtgccacaattgcagtatgatgtttatagcaatctcatcaatcgaatggctcaagtagccgaaagcttcgaccagtcgttgaggcaggtcaaacttttcattttgcaaaacaagattcttggcagctatttgctcgaacaaaatagggcgttggctgaaaaggaaaaggatatggatgtttttcattcagagcttatttctcaaagtaagcttgaactggaaaataccatacaaaaaatggaacaattgagcttacaaatggagacacaaagagaaggcatggaccaagccaaagaggacatggatgcaggattgcgaagtttccaaaatagaagggttgcggaagccatgtttgctgtaatcagcgctacagctgcaatcggtctcgcatttgttaccggtggtgcaacagctcctgcagctgtgacggcagcagggaacgctgtaagagcagcgggtcaagctgcaaatgcgctccaaagagtagtggaaatcttggagggcttgcaagaggtgatggcaatggtggctctgataaaggagctagtggattccttgcaagacataggtcagcttgtggaagcaccagagatgccagtgttgccaagtgaggcggaatggttcatttttgagaataatgtcgaggaagtggcagaagggatgcctacagaggtgtcggaggtgtcggcatggaagacgaggtgcaagaatgtggcagtattgggtcgggcgatggtctctacagcggcttacatatcgcagctgcagtacgacatcaaggtcgaggtgatgcggcaggagatttccaaacgccacagtgaaaggctattggccatccaaccagcagatcttagcagctatacatcactgctgacgcacatggacatgcgcaacacacgcatgttactggtgctcatcagggtgctgcacatacagaatgctgcactcatgtaccacagcctatcactgccaacccatatgaatgcatggcccgtcactatggataccgtgtggcgcatgctggtgcaacatgaacatgctgctattctaggattgttgaggttagggcccagctttgacttcatgcgcacctatgtggtgaaggatattcctgtgagcctcctgcgtgatggtgaggactgtgagttcaacatctccgtgcaagatcacttagccttcccctccacctggtctcgtgtgcgcattcatcaccttgaaatgaagtttgtgcaggaggctcatgttcaccagcctagcactcatacgggcaaagtctacatccttctccaaggctctcgcatcttccacgatcgcaacgaggatgatgtccttcattatgaggctgccatgcctctcgacttacactacgcctaccggctcgacacaggggagactacactctccaatctgccctccaatgatttcatcaggacattcatacgcacgacaccctttactacctggagactccgcctctctgcctctgccgaagaaaacgaagggctcgactttcccactgcgcttactgccgacgccaccacccagattgcaatcactttctatgtctccgctatcaggcggatttctctctag

SEQ ID NO: 939 - DNA, 2682 bp, Coniogramme venusta Ping Wu
  source 1..2682: mol_type = other DNA
atggctgctgcggcggagcggcggttgccggactatagagagctgtacaaggatttgaaccagataagtgagagggtgaggttcgatcagatggagttttcggaggtgatggtgatacaccgcatgtttataaggatggaggagttggacttggggcacctcgaaggagccgagaaggtgaagcgattgtatgtgtttgcagatgtggtggaggtggcagaaggtgttagttggggcctctggaggaacggcccattagcgagattgcctggttcgattgcgatagtcatagtgtgtcgcgtgctatgggtgagtggtgttcttgctagcctagggaataattccatgatgctacagcttccacacatgaagttgcgtgtgctggagatcacaccaagtaaactggaaatacatcgtgtagacactagtacagaagctgcagattatcctgccctctgcatacatgccagtgtcttggagtgctccaatatccgtttggcgaatgatagagacaggcctcctttcccggttcgtctctttggtttcaggcccgaactacgtgacccaaaccttgtcttctcttccgtgcctaggtctgttgttgatcaccaccctatttatgagttctatgtattctctgtaatccgcgatgtttttcctcgactgcccctcccagaatcagtctcagtccagcttgactcagccactcgcggggccaattggtatagtcttcaaacaggctccataagtcaagttggaagtgtttcattgaatcgctttccggctgaagaagaagagctggagccggcgttctcactaatgaagaccaaaatcccggctgccatactcacagatcctaacattttactcaccattcaaactagtctgcttatcgcagagttagttgaggtgactcacccttcagcggagacagtggctgctgtagccaagcatgccgaatgggtcaatgagctcttgcttcaggcgacatcagaagcggcagggacttcatctcatgaagagtacctcgcactcttattccgttcacagtacctcataaaagtgaggggcaggacacgcagccttgtagtgccacaattgcagtatgatgtttatagcaatctcatcaatcgaatggctcaagtagccgaaagcttcgaccagtcgttgaggcaggtcaaacttttcattttgcaaaacaagattcttggcagctatttgctcgaacaaaatagggcgttggctgaaaaggaaaaggatatggatgtttttcattcagagcttatttctcaaagtaagcttgaactggaaaataccatacaaaaaatggaacaattgagcttacaaatggagacacaaagagaaggcatggaccaagccaaagaggacatggatgcaggattgcgaagtttccaaaatagaagggttgcggaagccatgtttgctgtaatcagcgctacagctgcaatcggtctcgcatttgttaccggtggtgcaacagctcctgcagctgtgacggcagcagggaacgctgtaagagcagcgggtcaagctgcaaatgcgctccaaagagtagtggaaatcttggagggcttgcaagaggtgatggcaatggtggctctgataaaggagctagtggattccttgcaagacataggtcagcttgtggaagcaccagagatgccagtgttgccaagtgaggcggaatggttcatttttgagaataatgtcgaggaagtggcagaagggatgcctacagaggtgtcggaggtgtcggcatggaagacgaggtgcaagaatgtggcagtattgggtcgggcgatggtctctacagcggcttacatatcgcagctgcagtacgacatcaaggtcgaggtgatgcggcaggagatttccaaacgccacagtgaaaggctattggccatccaaccagcagatcttagcagctatacatcactgctgacgcacatggacatgcgcaacacacgcatgttactggcgctcatcagggtgctgcacatacagaatgctgcactcatgtaccacagcctatcactgccaacccatatgaatgcatggcccgtcactatggataccgtgtggcgcatgctggtgcaacatgaacatgctgctattctaggattgttgaggttagggcccagctttgacttcatgcgcacctatgtggtgaaggatattcctgtgagcctcctgcgtgatggtgaggactgtgagttcaacatctccgtgcaagatcacttagccttcccctccacctggtctcgtgtgcgcattcatcaccttgaaatgaagtttgtgcaggaggctcatgttcaccagcctagcactcatacgggcaaagtctacatccttctccaaggctctcgcatcttccacgatcgcaacgaggatgatgtccttcattatgaggctgccatgcctctcgacttacactatgcctaccgtctcgacacaggggagactacactctccaatctgccctccaatgatttcatcaggacattcatacgcacgacaccctttactacctggagactccgcctctctgcctctgccgaagaaaatgaagggctcgactttcccactgcgcttactgccgacgccaccacccagattgcaatcactttctatgtctccgctatcaggcggatttctctctag

SEQ ID NO: 940 - DNA, 2880 bp, Coniogramme venusta Ping Wu
  source 1..2880: mol_type = other DNA
atgtgtctctggaaggttgagatggctgatcatgaagagcgattgacagtggctgacatggatgctgcaacagactatgattatgagtttgatcacgatgaggagtcgccagaacacctagcaaggaaggtcgagatggttgatgtggctgatgatgacgatgagtctggcatgactattgtgcatggggagtcgacagaacagttggcaaggggtactaggagtgtggattttggggccgaggagtacagagatctgaaccaggtgagtgagaggatacggttggatcagatggagttttcggaggtgatgacgattcatcggatgcacatcaagctgtcggagctggacttgggccatttagagggcgcggagaaggtgaaactcctgtacgtgtttgcggatgtggtggaggtggacgaagaggagagtggtgagctacctgtgcggtttcccggctccatgtcagtattcatactgtgtcgcgtttggcacgtcagggctttcgtaggactcgacggtcgcaaccatcaccgggttttaagcctcccgcacatgacgttgcattaccattcatcaccagctaggacgttacatcgtcttgacccagcaacactggaagatgttgccgagcctgccctgagcatatacgccgatgtcattcaagtctggttgcaaaattggcctgccgcgatacattctgtagctccattctatttcgagtcctccgactccgaggtcctacttaccaggccaaaccagcagcgtccactcgagaaaaccagccttttccgggcaaggttttttcgaaatgggattccgaatccaggcttgcctccaattaccagtcatgcatttagtgtaagggttgcagatagacaggtattgtctgggggcggatccttcccaacatcaagatattccccggcattcccaaggggtctgttaactccagatatccccgtcatcattctcacagattcccacattttgcccgccttgcagaccagccttcttatcgcagagctagtggagcttggtcgcccatcacaagccacaattgatgctgtggccagccacttgcgatggctcaacaagctcctgctaaaggtgattcacgaaacaaaaggcactgcatttcgacaggatgagtacctggagctctcatttcgtgctcagtacttgatcaagaagatggggaatatccgcagccttgtagtgcctcaattgcaatacagcgtttatagccctctcatcaatcgaatggcccaggttgcagaaagctatgaccaatcactcacgcagttccgactctttattcagcaaaacaggattctgggcagctttctgctagagcaaaacagggcctttgctcagagggaaaaagatatggatgctttccactcagagcttatctctgaaagggaaactgaattggaaaataccttggacaaaatgctccaattacactcacaaatggagcaggagagtgcagaaatggagcgagcccgacagacaatggaagaaggtatcatagatttccaaaggagaacaattttgagggccgtgttttccatattcgctgctgtagctgggcttgctcttgctttcgtaaccgctggtgcagcagctcccgccgcagtggcaggtgcaagtgctgccgtgagtgctgtgtcgaacacggttacagttgcagcagccctacaacgaatagtggacatgctacagatcttggagacggtgatggaggtggtgcgaataatcaaagaagtaatagctaatatggatcttgttgatcagcttgcggatgcaccagagatgccagagatgccatccgatcacaaatggcttatctttatgaatgacgttgacgaagtggcggaggagatacctccaggggtgtcaggggtttctgcatggagagcaagatgcaggaatgtggcagttctgggtcgagagatgataactactgcaagtttcatttcgcagctgcagtatgaaatcaaggtgcagacgatgctgcaggagattgccaaaaggcaggctcagcggttgttggccatccagctaccaagtcttaccaactttaccgagatggtaacacagatggacatgagaacaactcgcattttggtgaccctgataaaagtggtggaagtgcaaaatgcagcgcttatgtatcagtacctatcgaaacccacacaagtgaatgcatggccagttaccatggacaccttgtggagaatactggtgcaacatgagcatagtgcaattagggggctcataaggttggggccttccttcgatataaaccgtaaccatgtggtgcgtcacattccggtatacttgttgatgcatggaaaagattggcagttcgagatcccggcactgcatcatgatggtgcaactgatgatgatgatgagatggatgcatttccgtcttcgtggtcacgcgtgcgcattcatcacctggagatgaagttcgtgaaggcgccacacgtccaccagcccaccaccaaaaccggctccatctacattcttttgcagggctcgcgtatctttgaggaccgcaatcaaggtgcaagagttcactatgaagccgccacctccctagactaccactatgcctaccgcttggagacaggcgagaccacccttaccaacttcccctccatggagtttacccaaaccttcatgcgcatgacgccattcacgacatggagactgcgtctctccgcctcggcgagagaaaatgaagggcttaccttccccacggcgatcatgtctggcccgacggactcctctgaaattgacccagacgctaccactgagatcgccatcactttttccatctccgctattaggcatgtctctttctag

SEQ ID NO: 941 - DNA, 2766 bp, Coniogramme venusta Ping Wu
  source 1..2766: mol_type = other DNA
atgtgtctctggaaggttgagatggttgatgtggctgatgatgacgatgagtctggcatgactattgtgcatggggagtcgacagaacagttggcaaggggtactaggagtgtggattttggggccgaggagtacagagatctgaaccaggtgagtgagaggatacggttggatcagatggagttttcggaggtgatgacgattcatcggatgcacatcaagctgtcggagctggacttgggccatttagagggcgcggagaaggtgaaactcctgtacgtgtttgcggatgtggtggaggtggacgaagaggagagtggtgagctacctgtgcggtttcccggctccatgtcagtattcatactgtgtcgcgtttggcacgtcagggctttcgtaggactcgacggtcgcaaccatcaccgggttttaagcctcccgcacatgacgttgcattaccattcatcaccagctaggacgttacatcgtcttgacccagcaacactggaagatgttgccgagcctgccctgagcatatacgccgatgtcattcaagtctggttgcaaaattggcctgccgcgatacattctgtagctccattctatttcgagtcctccgactccgaggtcctacttaccaggccaaaccagcagcgtccactcgagaaaaccagccttttccgggcaaggttttttcgaaatgggattccgaatccaggcttgcctccaattaccagtcatgcatttagtgtaagggttgcagatagacaggtattgtctgggggcggatccttcccaacatcaagatattccccggcattcccaaggggtctgttaactccagatatccccgtcatcattctcacagattcccacattttgcccgccttgcagaccagccttcttatcgcagagctagtggagcttggtcgcccatcacaagccacaattgatgctgtggccagccacttgcgatggctcaacaagctcctgctaaaggtgattcacgaaacaaaaggcactgcatttcgacaggatgagtacctggagctctcatttcgtgctcagtacttgatcaagaagatggggaatattcgcagccttgtagtgcctcaattgcaatacagcgtttatagccctctcatcaatcgaatggcccaggttgcagaaagctatgaccaatcactcacgcagttccgactctttattcagcaaaacaggattctgggcagctttctgctagagcaaaacagggcctttgctcagagggaaaaagatatggatgctttccactcagagcttatctctgaaagggaaactgaattggaaaataccttggacaaaatgctccaattacactcacaaatggagcaggagagtgcagaaatggagcgagcccgacagacaatggaagaaggtatcatagatttccaaaggagaacaattttgagggccgtgttttccatattcgctgctgtagctgggcttgctcttgctttcgtaaccgctggtgcagcagctcccgccgcagtggcaggtgcaagtgctgccgtgagtgctgtgtcgaacacggttacagttgcagcagccctacaacgaatagtggacatgctacagatcttggagacggtgatggaggtggtgcgaataatcaaagaagtaatagctaatatggatcttgttgatcagcttgcggatgcaccagagatgccagagatgccatccgatcacaaatggcttatctttatgaatgacgttgacgaagtggcggaggagatacctccaggggtgtcaggggtttctgcatggagagcaagatgcaggaatgtggcagttctgggtcgagagatgataactactgcaagtttcatttcgcagctgcagtatgaaatcaaggtgcagacgatgctgcaggagattgccaaaaggcaggctcagcggttgttggccatccagctaccaagtcttaccaactttaccgagatggtaacacagatggacatgagaacaactcgcattttggtgaccctgataaaagtggtggaagtgcaaaatgcagcgcttatgtatcagtacctatcgaaacccacacaagtgaatgcatggccagttaccatggacaccttgtggagaatactggtgcaacatgagcatagtgcaattagggggctcataaggttggggccttccttcgatataaaccgtaaccatgtggtgcgtcacattccggtatacttgttgatgcatggaaaagattggcagttcgagatcccggcactgcatcatgatggtgcaactgatgatgatgatgagatggatgcatttccgtcttcgtggtcacgcgtgcgcattcatcacctggagatgaagttcgtgaaggcgccacacgtccaccagcccaccaccaaaaccggctccatctacattcttttgcagggctcgcgtatctttgaggaccgcaatcaaggtgcaagagttcactatgaagccgccacctccctagactaccactatgcctaccgcttggagacaggcgagaccacccttaccaacttcccctccatggagtttacccaaaccttcatgcgcatgacgccattcacgacatggagactgcgtctctccgcctcggcgagagaaaatgaagggcttaccttccccacggcgatcatgtctggcccgacggactcctctgaaattgacccagacgctaccactgagatcgccatcactttttccatctccgctattaggcatgtctctttctag

SEQ ID NO: 942 - DNA, 2880 bp, Coniogramme venusta Ping Wu
  source 1..2880: mol_type = other DNA
atgtgtctctggaaggttgagatggctgatcatgaagagcgattgacagtggctgacatggatgctgcaacagactatgattatgagtttgatcacgatgaggagtcgccagaacacctagcaaggaaggtcgagatggttgacgtggctgatgatgacgatgagtctggcatgactattgtgcatggggagtcgacagaacagttggcaaggggtactaggagtgtggattttggggccgaggagtacagagatctgaaccaggtgagtgagaggatacggttggatcagatggagttttcggaggtgatgacgattcatcggatgcgcatcaagctgtcggagctggacttgggccatttagagggcgcggagaaggtgaaactcctgtacgtgtttgcggatgtggtggaggtggacgaagaggagagtggtgagctacctgtgcggtttcccggctccatgtcagtattcatactgtgtcgcgtttggcacgtaagggctttcgtaggactcaacggtcgcaaccatcaccgggttttaagcctcccgcacatgacgttgcattataaccattcatcaccagctaggacgttacatcgtcttgacccagctacactggaagatgttgccgagcctgccctgagcatatacgccgatgtcattcaagtctggttgcaaaattggcctgccgcgatacattctgtagctccattccatttcgagtcctccgactccgaggtcctacttagcaggccaaaccggccgagtctcgagaagaccagccgtttccaggcaaggctttttcgaaatgggattccgaatccgggcttgcctccaattaccaatcatgcatttagtataagggttgcagatagacaggtattgtctgggagcggacccttcccaacatcaagatattccccggcattcccaaggggtctgttaactccagatatccccgtcgtcattctcacagattcccacattttgcccgccttgcagaccagccttcttatcgcagagctagtggagcttggtcgcccatcacaagccacaattgatgctgtggccagccacttgcgatggctcaacaagctcctgctaaaggtgattcacgaaacaaaaggcactgcatttcgacaggatgagtacctggagctctcatttcgtgctcagtacttgatcaagaagatggggaatatccgcagccttgtagtgcctcaattgcaatacagagtttatagccctctcatcaatcgaatggcccaggttgcagaaagctatgaccaatcactcacgcagttccgactctttattcagcaaaacaggattctgggcagctttctgctagagcaaaacagggcctttgctcagagggaacaagatatggatgctttccactcagagcttatctctgaaagggaaactgagttggaaaataccttggacaaaatgctccaattacactcacaaatggagcaggagagtgcagaaatggagcgagcccgacagacaatggaagaaggtatcatagatttccaaaggagaacaattttgagggccgtgttttccatatttgctgctgtagctgggcttgctcttgctttcgtaaccgctggtgcagcagctcccgccgcggtggcaggtgcaagtgctgccgtgagtgctgtgtcgaacacggttagagttgcagcagccctacaacgaatagtggacatgctacagatcttggagacggtgatggaggtggtgcgaataatcaaagaagtaatagctaatatggatcttgttgatcagcttgcggatgcaccagagatgccagagatgccatccgatcacacatggcttatctttatgaatgacgttgacgaagtggcggaggagatacctccaggggtgtcaggggtttctgcatggagagcaagatgcaggaatgtggcagttctgggtcgagagatgataactactgcaagtttcatttcgcagctgcagtatgaaatcaaggtgcagacgatgctgcaggagattgccaaaaggcaggctgagcggttgttggccatccagctaccaagtcttaccaactttaccgagatggtaacacagatggacatgagaacaactcgcattttggtgaccctgataaaagtggtggaagtgcaaaatgcagcgcttatgtatcagtacctatcgaaacccacacaagtgaatgcatggccagttaccatggacaccttgtggagaatactggtgcaacatgagcatagtgcaattagggggctcataaggttggggccttccttcgatataaaccgtaactatgtggtgcgtcacattccggtatacttgttgatgcatggaaaagattggcagttcgagatcccggcactgcatcatgatggtgcaactgatgatgatgatgagatggatgcatttccgtcttcgtggtcacgcgtgcgcattcatcacctggagatgaagttcgtgaaggcgccacacgtccaccagcccaccaccaaaaccggctccatctacattcttttgcagggctcgcgtatctttgaggaccgcaatcaaggtgcaagagttcactatgaagccgccacctccctagactaccactatgcctaccgcttggagacaggcgagaccacccttaccaacttcccctccatggagtttacccaaaccttcatgcgcatgacgccattcacgacatggagactgcgtctctccgcctcggcgagagaaaatgaagggcttaccttccccacggcgatcatgtctggcccgacggactcctctgaaattgacccagacgctaccactgagatcgccatcactttttccatctccgctattaggcatgtctctttctag

SEQ ID NO: 943 - DNA, 2871 bp, Coniogramme venusta Ping Wu
  source 1..2871: mol_type = other DNA
atgtgtctctggaaggttgagatggctgatcatgaagagcgattgacagtggctgacatggatgctgcaacagactatgattatgagtttgatcacgatgaggagtcgccagaacacctagcaaggaaggtcgagatggttgatgtggctgatgatgacgatgagtctggcatgactattgtgcatggggagtcgacagaacagttggcaaggagtgtggattttggggccgaggagtacagagatctgaaccaggtgagtgagaggatacggttggatcagatggagttttcggaggtgatgacgattcatcggatgcacatcaagctgtcggagctggacttgggccatttagagggcgcggagaaggtgaaactcctgtacgtgtttgcggatgtggtggaggtggacgaagaggagagtggtgagctacctgtgcggtttcccggctccatgtcagtattcatactgtgtcgcgtttggcacgtcagggctttcgtaggactcgacggtcgcaaccatcaccgggttttaagcctcccgcacatgacgttgcattaccattcatcaccagctaggacgttacatcgtcttgacccagcaacactggaagatgttgccgagcctgccctgagcatatacgccgatgtcattcaagtctggttgcaaaattggcctgccgcgatacattctgtagctccattctatttcgagtcctccgactccgaggtcctacttaccaggccaaaccagcagcgtccactcgagaaaaccagccttttccgggcaaggttttttcgaaatgggattccgaatccaggcttgcctccaattaccagtcatgcatttagtgtaagggttgcagatagacaggtattgtctgggggcggatccttcccaacatcaagatattccccggcattcccaaggggtctgttaactccagatatccccgtcatcattctcacagattcccacattttgcccgccttgcagaccagccttcttatcgcagagctagtggagcttggtcgcccatcacaagccacaattgatgctgtggccagccacttgcgatggctcaacaagctcctgctaaaggtgattcacgaaacaaaaggcactgcatttcgacaggatgagtacctggagctctcatttcgtgctcagtacttgatcaagaagatggggaatatccgcagccttgtagtgcctcaattgcaatacagcgtttatagccctctcatcaatcgaatggcccaggttgcagaaagctatgaccaatcactcacgcagttccgactctttattcagcaaaacaggattctgggcagctttctgctagagcaaaacagggcctttgctcagagggaaaaagatatggatgctttccactcagagcttatctctgaaagggaaactgaattggaaaataccttggacaaaatgctccaattacactcacaaatggagcaggagagtgcagaaatggagcgagcccgacagacaatggaagaaggtatcatagatttccaaaggagaacaattttgagggccgtgttttccatattcgctgctgtagctgggcttgctcttgctttcgtaaccgctggtgcagcagctcccgccgcagtggcaggtgcaagtgctgccgtgagtgctgtgtcgaacacggttacagttgcagcagccctacaacgaatagtggacatgctacagatcttggagacggtgatggaggtggtgcgaataatcaaagaagtaatagctaatatggatcttgttgatcagcttgcggatgcaccagagatgccagagatgccatccgatcacaaatggcttatctttatgaatgacgttgacgaagtggcggaggagatacctccaggggtgtcaggggtttctgcatggagagcaagatgcaggaatgtggcagttctgggtcgagagatgataactactgcaagtttcatttcgcagctgcagtatgaaatcaaggtgcagacgatgctgcaggagattgccaaaaggcaggctcagcggttgttggccatccagctaccaagtcttaccaactttaccgagatggtaacacagatggacatgagaacaactcgcattttggtgaccctgataaaagtggtggaagtgcaaaatgcagcgcttatgtatcagtacctatcgaaacccacacaagtgaatgcatggccagttaccatggacaccttgtggagaatactggtgcaacatgagcatagtgcaattagggggctcataaggttggggccttccttcgatataaaccgtaaccatgtggtgcgtcacattccggtatacttgttgatgcatggaaaagattggcagttcgagatcccggcactgcatcatgatggtgcaactgatgatgatgatgagatggatgcatttccgtcttcgtggtcacgcgtgcgcattcatcacctggagatgaagttcgtgaaggcgccacacgtccaccagcccaccaccaaaaccggctccatctacattcttttgcagggctcgcgtatctttgaggaccgcaatcaaggtgcaagagttcactatgaagccgccacctccctagactaccactatgcctaccgcttggagacaggcgagaccacccttaccaacttcccctccatggagtttacccaaaccttcatgcgcatgacgccattcacgacatggagactgcgtctctccgcctcggcgagagaaaatgaagggcttaccttccccacggcgatcatgtctggcccgacggactcctctgaaattgacccagacgctaccactgagatcgccatcactttttccatctccgctattaggcatgtctcattctag

SEQ ID NO: 944 - DNA, 2880 bp, Coniogramme venusta Ping Wu
  source 1..2880: mol_type = other DNA
atgtgtctctggaaggttgagatggctgatcatgaagagcgattgacagtggctgacatggatgctgcaacagactatgattatgagtttgatcacgatgaggagtcgccagaacacctagcaaggaaggtcgagatggttgatgtggctgatgatgacgatgagtctggcatgactattgtgcatggggagtcgacagaacagttggcaaggggtactaggagtgtggattttggggccgaggagtacagagatctgaaccaggtgagtgagaggatacggttggatcagatggagttttcggaggtgatgacgattcatcggatgcacatcaagctgtcggagctggacttgggccatttagagggcgcggagaaggtgaaactcctgtacgtgtttgcggatgtggtggaggtggacgaagaggagagtggtgagctacctgtgcggtttcccggctccatgtcagtattcatactgtgtcgcgtttggcacgtcagggctttcgtaggactcgacggtcgcaaccatcaccgggttttaagcctcccgcacatgacgttgcattaccattcatcaccagctaggacgttacatcgtcttgacccagcaacactggaagatgttgccgagcctgccctgagcatatacgccgatgtcattcaagtctggttgcaaaattggcctgccgcgatacattctgtagctccattctatttcgagtcctccgactccgaggtcctacttaccaggccaaaccagcagcgtccactcgagaaaaccagccttttccgggcaaggttttttcgaaatgggattccgaatccaggcttgcctccaattaccagtcatgcatttagtgtaagggttgcagatagacaggtattgtctgggggcggatccttcccaacatcaagatattccccggcattcccaaggggtctgttaactccagatatccccgtcatcattctcacagattcccacattttgcccgccttgcagaccagccttcttatcgcagagctagtggagcttggtcgcccatcacaagccacaattgatgctgtggccagccacttgcgatggctcaacaagctcctgctaaaggtgattcacgaaacaaaaggcactgcatttcgacaggatgagtacctggagctctcatttcgtgctcagtacttgatcaagaagatggggaatattcgcagccttgtagtgcctcaattgcaatacagcgtttatagccctctcatcaatcgaatggcccaggttgcagaaagctatgaccaatcactcacgcagttccgactctttattcagcaaaacaggattctgggcagctttctgctagagcaaaacagggcctttgctcagagggaaaaagatatggatgctttccactcagagcttatctctgaaagggaaactgaattggaaaataccttggacaaaatgctccaattacactcacaaatggagcaggagagtgcagaaatggagcgagcccgacagacaatggaagaaggtatcatagatttccaaaggagaacaattttgagggccgtgttttccatattcgctgctgtagctgggcttgctcttgctttagtaaccgctggtgcagcagctcccgccgcagtggcaggtgcaagtgctgccgtgagtgctgtgtcgaacacggttacagttgcagcagccctacaacgaatagtggacatgctacagatcttggagacggtgatggaggtggtgcgaataatcaaagaagtaatagctaatatggatcttgttgatcagcttgcggatgcaccagagatgccagagatgccatccgatcacaaatggcttatctttatgaatgacgttgacgaagtggcggaggagatacctccaggggtgtcaggggtttctgcatggagagcaagatgcaggaatgtggcagttctgggtcgagagatgataactactgcaagtttcatttcgcagctgcagtatgaaatcaaggtgcagacgatgctgcaggagattgccaaaaggcaggctcagcggttgttggccatccagctaccaagtcttaccaactttaccgagatggtaacacagatggacatgagaacaactcgcattttggtgaccctgataaaagtggtggaagtgcaaaatgcagcgcttatgtatcagtacctatcgaaacccacacaagtgaatgcatggccagttaccatggacaccttgtggagaatactggtgcaacatgagcatagtgcaattagggggctcataaggttggggccttccttcgatataaaccgtaaccatgtggtgcgtcacattccggtatacttgttgatgcatggaaaagattggcagttcgagatcccggcactgcatcatgatggtgcaactgatgatgatgatgagatggatgcatttccgtcttcgtggtcacgcgtgcgcattcatcacctggagatgaagttcgtgaaggcgccacacgtccaccagcccaccaccaaaaccggctccatctacattcttttgcagggctcgcgtatctttgaggaccgcaatcaaggtgcaagagttcactatgaagccgccacctccctagactaccactatgcctaccgcttggagacaggcgagaccacccttaccaacttcccctccatggagtttacccaaaccttcatgcgcatgacgccattcacgacatggagactgcgtctctccgcctcggcgagagaaaatgaagggcttaccttccccacggcgatcatgtctggcccgacggactcctctgaaattgacccagacgctaccactgagatcgccatcactttttccatctccgctattaggcatgtctctttctag

SEQ ID NO: 945 - DNA, 2880 bp, Coniogramme venusta Ping Wu
  source 1..2880: mol_type = other DNA
atgtgtctctggaaggttgagatggctgatcatgaagagcgattgacagtggctgacatggatgctgcaacagactatgattatgagtttgatcacgatgaggagtcgccagaacacctagcaaggaaggtcgagatggttgacgtggctgatgatgacgatgagtctggcatgactattgtgcatggggagtcgacagaacagttggcaaggggtactaggagtgtggattttggggccgaggagtacagagatctgaaccaggtgagtgagaggatacggttggatcagatggagttttcggaggtgatgacgattcatcggatgcgcatcaagctgtcggagctggacttgggccatttagagggcgcggagaaggtgaaactcctgtacgtgtttgcggatgtggtggaggtggacgaagaggagagtggtgagctacctgtgcggtttcccggctccatgtcagtattcatactgtgtcgcgtttggcacgtaagggctttcgtaggactcaacggtcgcaaccatcaccgggttttaagcctcccgcacatgacgttgcattataaccattcatcaccagctaggacgttacatcgtcttgacccagctacactggaagatgttgccgagcctgccctgagcatatacgccgatgtcattcaagtctggttgcaaaattggcctgccgcgatacattctgtagctccattccatttcgagtcctccgactccgaggtcctacttagcaggccaaaccggccgagtctcgagaagaccagccgtttccaggcaaggctttttcgaaatgggattccgaatccgggcttgcctccaattaccaatcatgcatttagtataagggttgcagatagacaggtattgtctgggagcggacccttcccaacatcaagatattccccggcattcccaaggggtctgttaactccagatatccccgtcgtcattctcacagattcccacattttgcccgccttgcagaccagccttcttatcgcagagctagtggagcttggtcgcccatcacaagccacaattgatgctgtggccagccacttgcgatggctcaacaagctcctgctaaaggtgattcacgaaacaaaaggcactgcatttcgacaggatgagtacctggagctctcatttcgtgctcagtacttgatcaagaagatggggaatatccgcagccttgtagtgcctcaattgcaatacagagtttatagccctctcatcaatcgaatggcccaggttgcagaaagctatgaccaatcactcacgcagttccgactctttattcagcaaaacaggattctgggcagctttctgctagagcaaaacagggcctttgctcagagggaaaaagatatggatgctttccactcagagcttatctctgaaagggaaactgaattggaaaataccttggacaaaatgctccaattacactcacaaatggagcaggagagtgcagaaatggagcgagcccgacagacaatggaagaaggtatcatagatttccaaaggagaacaattttgagggccgtgttttccatattcgctgctgtagctgggcttgctcttgctttcgtaaccgctggtgcagcagctcccgccgcagtggcaggtgcaagtgctgccgtgagtgctgtgtcgaacacggttacagttgcagcagccctacaacgaatagtggacatgctacagatcttggagacggtgatggaggtggtgcgaataatcaaagaagtaatagctaatatggatcttgttgatcagcttgcggatgcaccagagatgccagagatgccatccgatcacaaatggcttatctttatgaatgacgttgacgaagtggcggaggagatacctccaggggtgtcaggggtttctgcatggagagcaagatgcaggaatgtggcagttctgggtcgagagatgataactactgcaagtttcatttcgcagctgcagtatgaaatcaaggtgcagacgatgctgcaggagattgccaaaaggcaggctcagcggttgttggccatccagctaccaagtcttaccaactttaccgagatggtaacacagatggacatgagaacaactcgcattttggtgaccctgataaaagtggtggaagtgcaaaatgcagcgcttatgtatcagtacctatcgaaacccacacaagtgaatgcatggccagttaccatggacaccttgtggagaatactggtgcaacatgagcatagtgcaattagggggctcataaggttggggccttccttcgatataaaccgtaaccatgtggtgcgtcacattccggtatacttgttgatgcatggaaaagattggcagttcgagatcccggcactgcatcatgatggtgcaactgatgatgatgatgagatggatgcatttccgtcttcgtggtcacgcgtgcgcattcatcacctggagatgaagttcgtgaaggcgccacacgtccaccagcccaccaccaaaaccggctccatctacattcttttgcagggctcgcgtatctttgaggaccgcaatcaaggtgcaagagttcactatgaagccgccacctccctagactaccactatgcctaccgcttggagacaggcgagaccacccttaccaacttcccctccatggagtttacccaaaccttcatgcgcatgacgccattcacgacatggagactgcgtctctccgcctcggcgagagaaaatgaagggcttaccttccccacggcgatcatgtctggcccgacggactcctctgaaattgacccagacgctaccactgagatcgccatcactttttccatctccgctattaggcatgtctctttctag

SEQ ID NO: 946 - DNA, 2628 bp, Lecanopteris sinuosa
  source 1..2628: mol_type = other DNA
atggagtatagctccttgtactcaaacccgagcctggtgaaccccaacctgcaagccacggagttctcggaagtgatggtggtgcatcgcatgcacgtctccctctcccagctcgacattaacacggccgatagcgtcactcgacccacgctgctggaaggcagcgacaaggtcaagcgcttgttcattgtggcggatgtcgtcgaggtgcctaccgcttatgtcttcctgcctgccagcctgtcggtggtcatcctgtgccgcctgctccatgtcaccgttcctcccacccatcacctgcatggcccctccgtatccctcaccttcccctttatgcggtttttcatcaatgagtttatcgcggatttctttccgtccaaggatgatgatgcagagattggctgttatatctatgccgatcgcatcatccgtcgattagccacctcgccgtcggatcgacgtttgcgtttagtcatggttgcggaaggtccttccgttttctccagggacaactggcctatcagccgttttgaatttacacaagacaccgttacgccagacgaacccctgtctatggcagactctgagctgcagaggtcggacgagtacgagctacaggacggcacaatccagtttcccttggccgtcatcacattctccccgctgctgccacccagcacgtctgcaatgggcagagggcttgacactgctcgtccgcctgtattctgctacttccaattccgctcagatgttccctcccatgttcttaccaacccacacgttgtgttgggcatgcaaatgaccatgctttttgcagagcttgtccaggtcgcccataatgcgccccgcgtgctcaagcttgttacgaggcatgttgaatggctcaacaagctcttgcgtcaggtggcgtccccaaatgatgatatcttaggcctcttgttccgagtgcaagtcttcaagaggacagctgagcagggacgcggctatctggtgccgatgctgcagtaccatatgtacagcaacctcattgaccgcatggtacaagccggggaggcttacgatcgagatctgaagaatcttcagttcttcattgcaacaaatcagatcttgggcaactacctgctacagcaaaatagggcttttgcagagagggagagagaaatgagtggtttccactcgaatgtcgtggaaatgcgaagggatgagctccggaatgccttgaataagatggacctgttagcattgcaaatggaaagggagaatacagcaatggaggaagcaagggaagcattggacaaagcaattctggagtatcaaaggagacagatggcaaatgccattctttctgtggttcgtgcggtggtaggtgttgctcttgcatttgccactgcgggtgcaacattagcaggggcagtggcatcagcaggacaggcggtgtcagcggcgggtcaagcagcagcaagtctcgccaaggttgtggccaccttggaagcattggaaggagtcatggagtttgtgatagccttacgagaggttgcagactcgctcgggagcatgaataacttagtaaatgcaccggagcagccagagttgccctcagatgcagactggtcaatttttgtgaatgagatagaggcagtggcagggcagatgccagaagaagtggtgggaccggtgtcagtgtggcaggcgaagtgcaagaacgtggcagtgctgggccgagagatgtgcaccacaacagcacatattggagagctaactcatcagatcaaggtggaagaaatgttgcaagagattgccctgcgccaggcagaccggctcgatgcaatatcttccccacaagatctctccagcttcacagagatgttgtcggagattgacatgcggtcactgcgattgctcctccagctcatcaagctgttgtacattcagaatccagcactcaagtatgaatacctgtttacaaccaccgagtccctggacacatggccagtgagcatggagacggtgcgcaatgtgctcatacggcaggaggcccgagctatccaaggcttgcttcaactaggggtttctaatgatcacactctcacctacgtcgccagtggcatacctgtcggattgctagttgaggggcatgattgggtgttttcatttcctgttcacaatttcgatgtcttccccgaagggttttcgcgagttcgcatacgctatgtcgagctcaagttcgatgctgctggtcaacaagcagaggggggcatgatccaccttcccagcaccaacactggcttactttatttgctcttacagtgctcaccaagctttgcagatcgcaagcaacaggagatgttgggttacgaggcaacctcaggggtcgcctatgcatatgcctacaacctgcaaaccggagagcccactcttaccaacatcccctccccggagtttgctaacacattcatgcgcatgacccccttcaacacatggagagtccgcctctctgcttctgcccccgaaaatcaaggtctatcatttctcacagccgactcccccgatgatactacccagattgccatcaccttccatttcagtgctgttcgaaggatacatatgcgtgaagccgaggacttttaa

SEQ ID NO: 947 - DNA, 2628 bp, Lecanopteris sinuosa
  source 1..2628: mol_type = other DNA
atggagtatagctccttgtactcaaacccgagcctggtgaaccccaacctgcaagccacggagttctcggaagtgatggtggtgcatcgcatgcacgtctccctctcccagctcgacattaacacggccgatagcgtcactcgacccacgctgctggaaggcagcgacaaggtcaagcgcttgttcattgtggcggatgtcgtcgaggtgcctaccgctcatgtcttcctgcctgccagcctgtcggtggtcatcctgtgccgcctgctccatgtcaccgttcctcccacccatcacctgcatggcccctccgtatccctcaccttcccctttatgcggtttttcatcaatgagtttatcgcggatttctttccgtccaaggatgatgatgccgagattggctgctatatctatgccgatcgcatcatccgtcgattagccacctcgccgtcggatcgacgtttgcgtttagtcatggttgcggaaggcccttccgttttctccagggacaactggcctatcagccgttttgaatttacacaagacaccgtcacgccagacgaacccctgtctatggcagactctgagctgcagaggtcggacgagtacgagctacaggacggcacaatccagtttcccttggccgtcatcacattctccccgctgctgccacccagcacgtctgcaatgggcagagggcttgacactgctcgtccgcctgtattctgctacttccaattccgctcagatgttccctcccatgtccttaccaacccacacgttgtgttgggcatgcaaatgaccatgctttttgcagagcttgtccaggtcgcccataatgcgccccgcgtgctcaagcttgttacgaggcatgttgtatggctcaacaagctcttgcgtcaggtggcgtccccaaatgatgatatcttaggcctcttgttccgagtgcaagtcttcaagaggacagctgagcagggacgcggctatctggtgccgatgctgcagtaccatatgtacagcaacctcattgaccgcatggtacaagccggggaggcttacgatcgagatctgaagaatcttcagttcttcattgcaacaaatcagatcttgggcaactacctgctacagcaaaatagggcttttgcagagagggagagagaaatgagtggtttccactcgaatgtcgtggaaatgcgaagggatgagctccggaatgccttgaataagatggacctgttagcattgcaaatggaaagggagaatacagcaatggaggaagcaagggaagcattggacaaagcaattctggagtatcaaaggagacagatggcaaatgccattctttctgtggttcgtgcggtggtaggtgttgctcttgcatttgccactgcgggtgcaacattagcaggggcagtggcatcagcaggacaggcggtgtcagcggcgggtcaagcagcagcaagtctcgccaaggttgtggccaccttggaagcattggaaggagtcatggagtttgtgatagccttacgagaggttgcagactcgctcgggagcatgaataacttagtaaatgcaccggagcagccagagttgccctcagatgcagactggtcaatttttgtgaatgagatagaggcagtggcagggcagatgccagaagaagtggtgggaccggtgtcagtgtggcaggcgaagtgcaagaacgtggcagtgctgggccgagagatgtgcaccacaacagcacatattggagagctaactcatcagatcaaggtggaagaaatgttgcaagagattgccctgcgccaggcagaccggctcgatgcaatatcttccccacaagatctctccagcttcacagagatgttgtcggagattgacatgcggtcactgcgattgctcctccagctcatcaagctgttgtacattcagaatccagcactcaagtatgaatacctgtttacaaccaccgagtccctggacacatggccagtgagcatggagacggtgcgcaatgtgctcatacggcaggaggcccgagctatccaaggcttgcttcaactaggggtttctaatgatcacactctcacctacgtcgccagtggcatacctgtcggattgctagttgaggggcatgattgggtgttttcatttcctgttcacaatttcgatgtcttccccgaagggttttcgcgagttcgcatacgctatgtcgagctcaagttcgatgctgctggtcaacaagcagaggggggcatgatccaccttcccagcaccaacactggcttactttatttgctcttacagtgctcaccaagctttgcagatcgcaagcaacaggagatgttgggttacgaggcaacctcaggggtcgcctatgcatatgcctacaacctgcaaaccggagagcccactcttaccaacatcccctcccccgagtttgctaacacattcatgcgcatgacccccttcaacacatggagagtccgcctctctgcttctgcccccgaaaatcaaggtctatcatttctcacagccgactcccccgatgatactacccagattgccatcaccttccatttcagtgctgttcgaaggatacatacgcgtgaagccgaggacttttaa

SEQ ID NO: 948 - DNA, 2628 bp, Lecanopteris sinuosa
  source 1..2628: mol_type = other DNA
atggagtatagctccttgtactcaaacccgagcctggtgaaccccaacctgcaagccacggagttctcggaagtgatggtggtgcatcgcatgcacgtctccctctcccagctcgacattaacacggccgatagcgtcactcgacccacgctgctggaaggcagcgacaaggtcaagcgcttgttcattgtggcggatgtcgtcgaggtgcctaccgctcatgtcttcctgcctgccagcctgtcggtggtcatcctgtgccgcctgctccatgtcaccgttcctcccacccatcacctgcatggcccctccgtatccctcaccttcccctttatgcggtttttcatcaatgagtttatcgcggatttctttccgtccaaggatgatgatgcagagattggctgttatatctatgccgatcgcatcatccgtcgattagccacctcgccgtcggatcgacgtttgcgtttagtcatggttgcggaaggcccttccgttttctccagggacaactggcctatcagccgttttgaatttacacaagacaccgttacgccagacgaacccctgtctatggcagactctgagctgcagaggtcggacgagtacgagctacaggacggcacaatccagtttcccttggccgtcatcacattctccccgctgctgccacccagcacgtctgcaatgggcagagggcttgacactgctcgtccgcctgtattctgctacttccaattccgctcagatgttccctcccatgttcttaccaacccacacgttgtgttgggcatgcaaatgaccatgctttttgcagagcttgtccaggtcgcccataatgcgccccgcgtgctcaagcttgttacgaggcatgttgaatggctcaacaagctcttgcgtcaggtggcgtccccaaatgatgatatcttaggcctcttgttccgagtgcaagtcttcaagaggacagctgagcagggacgcggctatctggtgccgatgctgcagtaccatatgtacagcaacctcattgaccgcatggtacaagccggggaggcttacgatcgagatctgaagaatcttcagttcttcattgcaacaaatcagatcttgggcaactacctgctacagcaaaatagggcttttgcagagagggagagagaaatgaatggtttccactcgaatgtcgtggaaatgcgaagggatgagctccggaatgccttgaataagatggacctgttagcattgcaaatggaaagggagaatacagcaatggaggaagcaagggaagcattggacaaagcaattctggagtatcaaaggagacagatggcaaatgccattctttctgtggttcgtgcggtggtaggtgttgctcttgcatttgccactgcgggtgcaacattagcaggggcagtggcatcagcaggacaggcggtgtcagcggcgggtcaagcagcagcaagtctcgccaaggttgtggccaccttggaagcattggaaggagtcatggagtttgtgatagccttacgagaggttgcagactcgctcgggagcatgaataacttagtaaatgcaccggagcagccagagttgccctcagatgcagactggtcaatttttgtgaatgagatagaggcagtggcagggcagatgccagaagaagtggtgggaccggtgtcagtgtggcaggcgaagtgcaagaacgtggcagtgctgggccgagagatgtgcaccacaacagcacatattggagagctaactcatcagatcaaggtggaagaaatgttgcaagagattgccctgcgccaggcagaccggctcgatgcaatatcttccccacaagatctatccagcttcacagagatgttgtcggagattgacatgcggtcactgcgattgctcctccagctcatcaagctgttgtacattcagaatccagcactcaagtatgaatacctgtttacaaccaccgagtccctggacacatggccagtgagcatggagacggtgcgcaatgtgctcatacggcaggaggcccgagctatccaaggcttgcttcaactaggggtttctaatgatcacactctcacctacgtcgccagtggcatacctgtcggattgctagttgaggggcatgattgggtgttttcatttcctgttcacaatttcgatgtcttccccgaagggttttcgcgagttcgcatacgctatgtcgagctcaagttcgatgctgctggtcaacaagcagaggggggcatgatccaccttcccagcaccaacactggcttactttatttgctcttacagtgctcaccaagctttgcagatcgcaagaaccaggagatgttgggttacgaggcaacctcaggggtcgcctatgcatatgcctacaacctgcaaaccggagagcccactcttaccaacatcccctccccggagtttgctaacacattcatgcgcatgacccccttcaacacatggagagtccgcctctctgcttctgcccccgaaaatcaaggtctatcatttctcacagccgactcccccgatgatactacccagattgccatcaccttccatttcagtgctgttcgaaggatacatacgcgtgaagccgaggacttttaa

SEQ ID NO: 949 - DNA, 2628 bp, Lecanopteris sinuosa
  source 1..2628: mol_type = other DNA
atggagtatagctccttgtactcaaacccgagcctggtgaaccccaacctgcaagccacggagttctcggaagtgatggtggtgcatcgcatgcacgtctccctctcccagctcgacattaacacggccgatagcgtcactcgacccacgctgctggaaggcagcgacaaggtcaagcgcttgttcattgtggcggatgtcgtcgaggtgcctaccgcttatgtcttcctgcctgccagcctgtcggtggtcatcctgtgccgcctgctccatgtcaccgttcctcccacccatcacctgcatggcccctccgtatccctcactttcccctttatgcggtttttcatcaatgagtttatcgcggatttctttccgtccaaggatgatgatgcagagattggctgttatatctatgccgatcgcatcatccgtcgattagccacctcgccgtcggatcgacgtttgcgtttagtcatggttgcggaaggtccttccgttttctccagggacaactggcctatcagccgttttgaatttacacaagacaccgttacgccagacgaacccctgtctatggcagactctgagctgcagaggtcggacgagtacgagctacaggacggcacaatccagtttcccttggccgtcatcacattctccccgctgctgccacccagcacgtctgcaatgggcagagggcttgacactgctcgtccgcctgtattctgctacttccaattccgctcagatgttccctcccatgttcttaccaacccacacgttgtgttgggcatgcaaatgaccatgctttttgcagagcttgtccaggtcgcccataatgcgccccgcgtgctcaagcttgttacgaggcatgttgaatggctcaacaagctcttgcgtcaggtggcgtccccaaatgatgatatcttaggcctcttgttccgagtgcaagtcttcaagaggacagctgagcagggacgcggctatctggtgccgatgctgcagtaccatatgtacagcaacctcattgaccgcatggtacaagccggggaggcttacgatcgagatctgaagaatcttcagttcttcattgcaacaaatcagatcttgggcaactacctgctacagcaaaatagggcttttgcagagagggagagagaaatgagtggtttccactcgaatgtcgtggaaatgcgaagggatgagctccggaatgccttgaataagatggacctgttagcattgcaaatggaaagggagaatacagcaatggaggaagcaagggaagcattggacaaagcaattctggagtatcaaaggagacagatggcaaatgccattctttctgtggttcgtgcggtggtaggtgttgctcttgcatttgccactgcgggtgcaacattaacaggggcagtggcatcagcaggacaggcggtgtcagcggcgggtcaagcagcagcaagtcttgccaaggttgtggccaccttggaagcattggaaggagtcatggagtttgtgatagccttacgagaggttgcagactcgctcgggagcatgaataacttagtaaatgcaccggagcagccagagttgccctcagatgcagactggtcaatttttgtgaatgagatagaggcagtggcagggcagatgccagaagaagtggtgggaccggtgtcagtgtggcaggcgaagtgcaagaacgtggcagtgctgggccgagagatgtgcaccacaacagcacatattggagagctaactcatcagatcaaggtggaagaaatgttgcaagagattgccctgcgccaggcagaccggctcgatgcaatatcttccccacaagatctatccagcttcacagagatgttgtcggagattgacatgcggtcactgcgattgcttctccagctcatcaagctgttgtacattcagaatccagcactcaagtatgaatacctgtttacaaccaccgagtccctggacacatggccagtgagcatggagacagtgcgcaatgtgctcatacggcaggaggcccgagctatccaaggcttgcttcaactaggggtttctaatgatcacactctcacctacgtcgccagtggcatacctgtcggattgctagttgaggggcatgattgggtgttttcatttcctgttcacaatttcgatgtcttccccgaagggttttcgcgagttcgcatacgctatgtcgagctcaagttcgatgctgctggtcaacaagcagaggggggcatgatccaccttcccagcaccaacactggcttactttatttgctcttacagtgctcaccaagctttgcagatcgcaagaaccaggagatgttgggttacgaggcaacctcaggggtcgcctatgcatatgcctacaacctgcaaaccggagagcccactcttaccaacatcccctccccggagtttgctaacacattcatgcgcatgacccccttcaacacatggagagtccgcctctctgcttctgcccccgaaaatcaaggtctatcatttctcacagccgactcccccgatgatactacccagattgccatcaccttccatttcagtgctgttcgaaggatacatacgcgtgaagccgaggacttttaa

SEQ ID NO: 950 - DNA, 2628 bp, Lecanopteris sinuosa
  source 1..2628: mol_type = other DNA
atggagtatagctccttgtactcaaacccgagcctggtgaaccccaacctgcaagccacggagttctcggaagtgatggtggtgcatcgcatgcacgtctccctctcccagctcgacattaacacggccgatagcgtcactcgacccacgctgctggaaggcagcgacaaggtcaagcgcttgttcattgtggcggatgtcgtcgaggtgcctaccgcttatgtcttcctgcctgccagcctgtcggtggtcatcctgtgccgcctgctccatgtcaccgttcctcccacccatcacctgcatggcccctccgtatccctcaccttcccctttatgcggtttttcatcaatgagtttatcgcggatttctttccgtccaaggatgatgatgcagagattggctgttatatctatgccgatcgcatcatccgtcgattagccacctcgccgtcggatcgacgtttgcgtttagtcatggttgcggaaggtccttccgttttctccagggacaactggcctatcagccgttttgaatttacacaagacaccgttacgccagacgaacccctgtctatggcagactctgagctgcagaggtcggacgagtacgagctacaggacggcacaatccagtttcccttggccgtcatcacattctccccgctgctgccacccagcacgtctgcaatgggcagagggcttgacactgctcgtccgcctgtattctgctacttccaattccgctcagatgttccctcccatgttcttaccaacccacacgttgtgttgggcatgcaaatgaccatgctttttgcagagcttgtccaggtcgcccataatgcgccccgcgtgctcaagcttgttacgaggcatgttgaatggctcaacaagctcttgcgtcaggtggcgtccccaaatgatgatatcttaggcctcttgttccgagtgcaagtcttcaagaggacagctgagcagggacgcggctatctggtgccgatgctgcagtaccatatgtacagcaacctcattgaccgcatggtacaagccggggaggcttacgatcgagatctgaagaatcttcagttcttcattgcaacaaatcagatcttgggcaactacctgctacagcaaaatagggcttttgcagagagggagagagaaatgagtggtttccactcgaatgtcgtggaaatgcgaagggatgagctccggaatgccttgaataagatggacctgttagcattgcaaatggaaagggagaatacagcaatggaggaagcaagggaagcattggacaaagcaattctggagtatcaaaggagacagatggcaaatgccattctttctgtggttcgtgcggtggtaggtgttgctcttgcatttgccactgcgggtgcaacattaacaggggcagtggcatcagcaggacaggcggtgtcagcggcgggtcaagcagcagcaagtcttgccaaggttgtggccaccttggaagcattggaaggagtcatggagtttgtgatagccttacgagaggttgcagactcgctcgggagcatgaataacttagtaaatgcaccggagcagccagagttgccctcagatgcagactggtcaatttttgtgaatgagatagaggcagtggcagggcagatgccagaagaagtggtgggaccggtgtcagtgtggcaggcgaagtgcaagaacgtggcagtgctgggccgagagatgtgcaccacaacagcacatattggagagctaactcatcagatcaaggtggaagaaatgttgcaagagattgccctgcgccaggcagaccggctcgatgcaatatcttccccacaagatctatccagcttcacagagatgttgtcggagattgacatgcggtcactgcgattgcttctccagctcatcaagctgttgtacattcagaatccagcactcaagtatgaatacctgtttacaaccaccgagtccctggacacatggccagtgagcatggagacagtgcgcaatgtgctcatacggcaggaggcccgagctatccaaggcttgcttcaactaggggtttctaatgatcacactctcacctacgtcgccagtgacatacctgtcggattgctagttgaggggcatgattgggtgttttcatttcctgttcacaatttcgatgtcttccccgaagggttttcgcgagttcgcatacgctatgtcgagctcaagttcgatgctgctggtcaacaagcagaggggggcatgatccaccttcccagcaccaacactggcttactttatttgctcttacagtgctcaccaagctttgcagatcgcaagaaccaggagatgttgggttacgaggcaacctcaggggtcgcctatgcatatgcctacaacctgcaaaccggagagcccactcttaccaacatcccctccccggagtttgctaacacattcatgcgcatgacccccttcaacacatggagagtccgcctctctgcttctgcccccgaaaatcaaggtctatcatttctcacagccgactcccccgatgatactacccagattgccatcaccttccatttcagtgctgttcgaaggatacatacgcgtgaagccgaggacttttaa

SEQ ID NO: 951 - DNA, 2664 bp, Cyrtomium clivicola fortuni
  source 1..2664: mol_type = other DNA
atggagtatagcagcttgtatggtgatgtgaaccaagtgagcctgaggttccagaacactgagttctctgaggtcatggtggtgcatcggatgtatgtgcgcctggaggagcttgacatgacgggggtggagggcatcgagaaggtgaaacgcctgtacgtgctggcggacgtggtggagctgccttccagagccaccacggtgtttgagagtttgcgccttcccgctaccatttcagcgattatcctctgccgcgttctatatatccctgaagttcagaggctctccggctcgtctttcgttgctcaatgctcgctcaacttcccatttatgcgcctccatgtcgtcggaagaagcgagggtggttcgggtgttctgcaagccttttcctccgacgccaccgccagcaatattggcgtctacctccatgctgaccgcttcatctaccgccaggccacatctccggccagcgactttgtctttcccctggatgtaagggtcagctttggcagctctaccttctccacagacgccgctcccgactggcaaaaccttaatgtctccagcatccagtacgggccacagaacctgtccaggggcccacccctcacatcctcagactctgacttgcagagatctgacgagatcgagctcctggcccggcaagatatttggagccctcttctacacgttgcgtttaacccgaatgcaccacctggcaacgtcccaggtacgcagggactattccaaccctcctctgcatgcagcttcttccatgtgccaccaccggatgtccctgcaaacgtgctcagtgatccttccatcatcttgggcatgcaaatgaacatgctcattgccgagcttgtcttggctgctcacaattcgccgcaagtcatgaacgtcatcactaagcatgtgctatggctcaacaagatcttgcttcaggttgcttcacccaatgatgatattttagcactcttgtttcgtacccaagcattcatgaagatggcaaagcaaccgcggtttgtggttccacggttgcagtaccacatgtacagtagtcttatcaatcgaatggtgcaagtagcccagaattatgaccaggagctcaagcaactcaagcttttcattgcacaaaatgagattttgggaagctatttgctagaacaaaataaggcttttgcagaaagggagaaggaaatgagtgcttttcactcgcaagtcgtgtcgatgaggacctctgagcttaggtctgccatagaatcgatgaatacgctgagtttgcaaatgcaaacagagagtgaggcgatgaacgaagcccaggagaacatggttgaagcaattcaagaatatgaaaggaaattacttgcaagagctctattttcagtgattgcggcaatagcaagtgttgctcttgcatttgccactggtggtgcaactgcaccaggggcagtggcagcagccggacgggctgtcactgcagcaggtaggttggcagaagggctccaaaaggttgtggacatcctacaaggcttgcaagcagtcatggaggttgtggtagccataagagacatcgtagaatcattggaaaacatgggtcaactagtagcagctcccgagatgccagagatgccaacagattcggactggttaatttttgtaaatgaggtggaggcagtggcagagcaagtgccaacagaagtggcagaggtcccagtgtggaaggctaagtgcaagaatgtggccgtgctaggtcaagcgatgtgcaccacagcagcatatattagtgagctacagtatgagataacggtggaagggatgctacaagagattgcacaacgtcaagcagacaggttagtggggatatcagcagcagatctattgagctacacagagatggcatcacaaatagacatgcgcacaacccgaatcctccttgagctcatcaagatgttgtacattcaaaatgcagcaattaagtatgagtacttgtatgatgctaatgagaagcttaattcatggccagtgagcatggagactgtatggaccatgctcatgcaacaagagagtgcagctctcttgggcttgctaaacttggggcccaccaatgatttcacagtaacccatgttgttaaagacatacctgtcaaggtgttagtagatggttatgattggaattttgagatcgcggtggaggattttgcaatctttccatcaggattgtctcgtgttcgcgtacgatatgttgagcttaaatttgaccaacaaggtactgatggtaggaacattgtcatccaccagcctagcactaacactggtttagtctacatgctcttacaaggctctcgtttcctccatgaccgcaaacgtgaggaggtgatggactatgaggcaagcatgggacctgtatatgcatatgcctatgacctcaacactggtgcaaccactctcaccaacatcccctcacaggaccatgccaacacatttatgcaaatgacaaccttcaatacttggagacttcgcctctctgcctctgctatggaaaatcagggattggtgtttcctacagccacttctcctgacagtactacccaaatttccatcacattctatgtcactgccattcgacgcatagattatcgacaagaggatgatgtggagtaa

SEQ ID NO: 952 - DNA, 2664 bp, Cyrtomium clivicola fortuni
  source 1..2664: mol_type = other DNA
atggagtatagcagcttgtatggtgatgtgaaccaagtgagcctgaggttccagaacactgagttctctgaggtcatggtggtgcatcggatgtatgtgcgcctggaggagcttgacatgacgggggtggagggcatcgagaaggtgaaacgcctgtacgtgctggcggacgtggtggagctgccttccagagccaccacggtgtttgagagtttgcgccttcccgctaccatttcagcgattatcctctgccgcgttctatatatccctgaagttcagaggctctccggctcgtctttcgttgctcaatgctcgctcaacttcccatttatgcgcctccatgtcgtcggaagaagcgagggtggttcgggtgttctgcaagccttttcctccgacgccaccgccagcaatattggcgtctacctccatgctgaccgcttcatctaccgccaggccacatctccggccagcgactttgtctttcccctggatgtaagggtcagctttggcagctctaccttctccacagacgccgctcccgactggcaaaaccttaatgtctccagcatccagtacgggccacagaacctgtccaggggcccacccctcacatcctcagactctgacttgcagagatctgacgagatcgagctcctggcccggcaagatatttggagccctcttctacacgttgcgtttaacccgaatgcaccacctggcaacgtcccaggtacgcagggactattccaaccctcctctgcatgcagcttcttccatgtgccaccaccggatgtccctgcaaacgtgctcagtgatccttccatcatcttgggcatgcaaatgaacatgctcattgccgagcttgtcttggctgctcacaattcgccgcaagtcatgaacgtcatcactaagcatgtgctatggctcaacaagatcttgcttcaggttgcttcacccaatgatgatattttagcactcttgtttcgtacccaagcattcatgaagatggcaaagcaaccgcggtttgtggttccacggttgcagtaccacatgtacagtagtcttatcaatcgaatggtgcaagtagcccagaattatgaccaggagctcaagcaactcaagcttttcattgcacaaaatgagattttgggaagctatttgctagaacaaaataaggcttttgcagaaagggagaaggaaatgagtgcttttcactcgcaagtcgtgtcgatgaggacctctgagcttaggtctaccatagaatcgatgaatacgctgagtttgcaaatgcaaacagagagtgaggcgatgaacgaagcccaggagaacatggttgaagcaattcaagaatatgaaaggaaattacttgcaagagctctattttcagtgattgcggcaatagcaagtgttgctcttgcatttgccactggtggtgcaactgcaccaggggcagtggcagcagccggacgggctgtcactgcagcaggtaggttggcagaagggctccaaaaggttgtggacatcctacaaggcttgcaagcagtcatggaggttgtggtagccataagagacatcgtagaatcattggaaaacatgggtcaactagtagcagctcccgagatgccagagatgccaacagattcggactggttaatttttgtaaatgaggtggaggcagtggcagagcaagtgccaacagaagtggcagaggtcccagtgtggaaggctaagtgcaagaatgtggccgtgctaggtcaagcgatgtgcaccacagcagcatatattagtgagctacagtatgagataacggtggaagggatgctacaagagattgcacaacgtcaagcagacaggttagtggggatatcagcagcagatctattgagctacacagagatggcatcacaaatagacatgcgcacaacccgaatcctccttgagctcatcaagatgttgtacattcaaaatgcagcaattaagtatgagtacttgtatgatgctaatgagaagcttaattcatggccagtgagcatggagactgtatggaccatgctcatgcaacaagagagtgcagctctcttgggcttgctaaacttggggcccaccaatgatttcacagtaacccatgttgttaaagacatacctgtcaaggtgttagtagatggttatgattggaattttgagatcgcggtggaggattttgcaatctttccatcaggattgtctcgtgttcgcgtacgatatgttgagcttaaatttgaccaacaaggtactgatggtaggaacattgtcatccaccagcctagcactaacactggtttagtctacatgctcttacaaggctctcgtttcctccatgaccgcaaacgtgaggaggtgatggactatgaggcaagcatgggacctgtatatgcatatgcctatgacctcaacactggtgcaaccactctcaccaacatcccctcacaggaccatgccaacacatttatgcaaatgacaaccttcaatacttggagacttcgcctctctgcctctgctatggaaaatcagggattggtgtttcctacagccacttctcctgacagtactacccaaatttccatcacattctatgtcactgccattcgacgcatagattatcgacaagaggatgatgtggagtaa

SEQ ID NO: 953 - DNA, 2112 bp, Cyrtomium clivicola fortuni
  source 1..2112: mol_type = other DNA
atggagtatagcagcttgtattgtgatgtgaaccaagtgagcctgaggttccagaacactgagttctctgaggtcatggtggtgcatcggatgtatgtgcgcctggcccggcaagatatttggagccctcttctacacgttgcgtttaacccgaatgcaccacctggcaacgtcccaggtacgcagggactattccaaccctcctctgcatgcagcttcttccatgtgccaccaccggatgtccctgcaaacgtgctcagtgatccttccatcatcttgggcatgcaaatgaacatgctcattgccgagcttgtcttggctgctcacaattcgccgcaagtcatgaacgtcatcactaagcatgtgctatggctcaacaagatcttgcttcaggttgcttcacccaatgatgatattttagcactcttgtttcgtacccaagcattcatgaagatggcaaagcaaccgcggtttgtggttccacggttgcagtaccacatgtacagtagtcttatcaatcgaatggtgcaagtagcccagaattatgaccaggagctcaagcaactcaagcttttcattgcacaaaatgagattttgggaagctatttgctagaacaaaataaggcttttgcagaaagggagaaggaaatgagtgcttttcactcgcaagtcgtgtcgatgaggacctctgagcttaggtctgccatagaatcgatgaatacgctgagtttgcaaatgcaaacagagagtgaggcgatgaacgaagcccaggagaacatggttgaagcaattcaagaatatgaaaggaaattacttgcaagagctctattttcagtgattgcggcaatagcaagtgttgctcttgcatttgccactggtggtgcaactgcaccaggggcagtggcagcagccggacgggctgtcactgcagcaggtaggttggcagaagggctccaaaaggttgtggacatcctacaaggcttgcaagcagtcatggaggttgtggtagccataagagacatcgtagaatcattggaaaacatgggtcaactagtagcagctcccgagatgccagagatgccaacagattcggactggttaatttttgtaaatgaggtggagacagtggcagagcaagtgccaacagaagtggcagaggtcccagtgtggaaggctaagtgcaagaatgtggccgtgctaggtcaagcgatgtgcaccacagcagcatatattagtgagctacagtatgagataacggtggaagggatgctacaagagattgcacaacgtcaagcagacaggttagtggggatatcagcagcagatctattgagctacacagagatggcatcacaaatagacatgcgcacaacccgaatcctccttgagctcatcaagatgttgtacattcaaaatgcagcaattaagtatgagtacttgtatgatgctaatgagaagcttaattcatggccagtgagcatggagactgtatggaccatgctcatgcaacaagagagtgcagctctcttgggcttgctaaacttggggcccaccaatgatttcacagtaacccatgttgttaaagacatacctgtcaaggtgttagtagatggttatgattggaattttgagatcgcggtggaggattttgcaatctttccatcaggattgtctcgtgttcgcgtacgatatgttgagcttaaatttgaccaacaaggtactgatggtaggaacattgtcatccaccagcctagcactaacactggtttagtctacatgctcttacaaggctctcgtttcctccatgaccgcaaacgtgaggaggtgatggactatgaggcaagcatgggacctgtatatgcatatgcctatgacctcaacactggtgcaaccactctcaccaacatcccctcacaggaccatgccaacacatttatgcaaatgacaaccttcaatacttggagacttcgcctctctgcctctgctatggaaaatcagggattggtgtttcctacagccacttctcctgacagtactacccaaatttccatcacattctatgtcactgccattcgacgcatagattatcgacaagaggatgatgtggagtaa

SEQ ID NO: 954 - DNA, 2667 bp, Drynaria rigidula whitei
  source 1..2667: mol_type = other DNA
atgcacccgagaggccatgacggaatcaggatccccctgcagcaggcccgcggtgatgattatgcagaggagaggcagatgagaccgaggttcaaggccaatggtctggagctggactacgagaagatttacgcagggtcaaactcgatagcaagggaggtgggtctgaacaaggtaaaatgcggcgaggtgatggccatccaccggatgtttttccggctagacactttatcccaagagctgttgcgacaaccggagctggttcagcgtctcatcgtggttgctgatgtggtagagattgagggctctaatgccccactctcgctgcccgcctcttctcttgtgctcatcttttgccgcatcctcatcctcaaaagcaaggacgtggtcctcgaccttggcaattgggatttgagggttgctaccacttctccgcttcaccgctgctctatccgcgctcaacgagttgtcattgcttcgggctccatctctgcctctctgctcattcaggtgaaacataaactcgaatggagcgatggcactcatcttgatcagtgttttggtcgtccattctccttcactgcatctgaagtcaactcttctgctacaatcaccactaggactacctctgctatgcggtcaatcaacacctggccgggtacagcacccgtgtctaacttcattcaagtgaactctgaacagttcaatgtgcttgtaaatgcagtcccatggaagggtgtcgtcgactgccaagctgcattgccttcattagatgatctgctgcatcctgatgttattagtggcattcaatctaccctacttattgtagaaaccatccttaactttcagactgacaatccggccattattatcctagcacgacagcatgctgaatggattgtggacagcttacttcaggtggcgcatttgccaaactctacagttggtgtttctgaggtaaaaactcttttggcgcgtgcgcaaatgctcatgaagctgcccacggatggaagccagcatttaaaagttccattactggcttatggtgagtaccaagaagatattgagcggctgctcagaaatgcagaggcgtacgaccaagagtacagagcgcttacccgattcgtacagctagtcgagatcataggcagcgagttcctgcagctgagcaagtctctcgcccaaagggagagggacatagaagcattcgagtccttggttgtcattcgcaagcaaagcgagctggatcaggccattaggagaatgaactcattgatgacagaaattgagagacgaagttttgagatggccgacgccaaagccaggatggaagagggtttgcaggactacaacagaaggcagttgactagggcaatttttggaatcctaggagcgttactgcagctttgcgcatccctgaagttcggtggtggggcggacattgcggggggcattgcaacaacagttcccgcagcaatagacctgatacatgcggtgcaagatgcaagtgcaagtaccaagcttttggccatatcgcagacattaatggatttagagaagatagttgatgttgtaaatgcagtgaatgcgctagtggagagcgccacagagctggaggacatcatacatgctccggagttgcctctcatactaccttacacatgggatatcttggagaacgacattgaggagtttgcagctctcatgccctccgaggtgtcggaggtggtaacatggaaggccaagtgcaggaatttagtcgcagtgtgcagggaaatttgcattgctgccagctttgcctgcgaggtgcagtatgagctctttgtgcatgctaggcaacaagagatggcacgaaggcaagcagaacgcttggagggaatgcaaacagcagccgacttgagcagctacatagagctggccacacaggcggacatgcgcactacgcgccttctcctaagcctgctcaatgtactggctggccatcagggcgcactccactatcactacttgatggagttggaggtgttcacgtccagctggccttcagtcgacggcgtgaggatgcatctgctgcagctgaatcaaagggctcgtgcccgagagaacgcgttatttggcgatggagttcttactgtggatttgcagcacgactatgtgctggatgcgatacctgtgagcttgctcttgtcaggcgaggattggagcttcaccatcaatccggagcgaaatgcatcggctttcccgacaccgtgggattatgtgcgtattcggtacgtggagatgaagttcacgggagagcaccagccagtgagcaagacgggagagatttacctgttgctcagatcatctgccaacttccaagaccggttggaagagcaggtgctggagtatgaggccgctgttccgctcgtctaccaatacgcctacaacctctcaactggcgcaacgacactgcccaatctaccctcggagagcggcaaattctttcgcatgacgcccttcacgcgctggagactgcggctctctgcatctgcataccagaatgagggcgtgtccttccccacactccctgatcatccagactcagctgatagccccgtccaaattacaatcaccttttacgttactgccctgccacaaatacagtcacgctccctcgatgtataa

SEQ ID NO: 955 - DNA, 2667 bp, Drynaria rigidula whitei
  source 1..2667: mol_type = other DNA
atgcacccgagaggccatgacggaatcaggatccccctgcagcaggccggcggtgatgattatgcagaggagaggcagatgagaccgaggttcaaggccaatggtctggagctggactacgagaagatttacgcagggtcaaactcgatagcaagggaggtgggtctgaacaaggtaaaatgcggcgaggtgatggccatccaccggatgtttttccggctagacactttatcccaagagctgttgcgacaaccggagctggttcagcgtctcatcgtggttgctgatgtggtagagattgagggctctaatgccccactctcgctgcccgcctcttctcttgtgctcatcttttgccgcatcctcatcctcaaaagcaaggacgtggtcctcgaccttggcaattgggatttgagggttgctaccacttctccgcttcaccgctgctctatccgcgctcaacgagttgtcattgcttcgggctccatctctgcctctctgctcattcaggtgaaacataaactcgaatggagcgatggcactcatcttgatcagtgttttggtcgtccattctccttcactgcatctgaagtcaactcttctgctacaatcaccactaggactacctctgctatgcggtcaatcaacacctggccgggtacagcacccgtgtctaacttcattcaagtgaactctgaacagttcaatgtgcttgtaaatgcagtcccatggaagggtgtcgtcgactgccaagctgcattgccttcattagatgatctgctgcatcctgatgttattagtggcattcaatctaccctacttattgtagaaaccatccttaactttcagactgacaatccggccattattatcctagcacgacagcatgctgaatggattgtggacagcttacttcaggtggcgcatttgccaaactctacagttggtgtttctgaggtaaaaactcttttggcgcgtgcgcaaatgctcatgaagctgcccacggatggaagccagcatttaaaagttccattactggcttatggtgagtaccaagaagatattgagcggctgctcagaaatgcagaggcgtacgaccaagagtacagagcgcttacccgattcgtacagctagtcgagatcataggcagcgagttcctgcagctgagcaagtctctcgcccaaagggagagggacatagaagcattcgagtccttggttgtcattcgcaagcaaagcgagctggatcaggccattaggagaatgaactcattgatgacagaaattgagagacgaagttttgagatggccgacgccaaagccaggatggaagagggtttgcaggactacaacagaaggcagttgactagggcaatttttggaatcctaggagcgttactgcagctttgcgcatccctgaagttcggtggtggggcggacattgcggggggcattgcaacaacagttcccgcagcaatagacctgatacatgcggtgcaagatgcaagtgcaagtaccaagcttttggccatatcgcagacattaatggatttagagaagatagttgatgttgtaaatgcagtgaatgcgctagtggagagcgccacagagctggaggacatcatacatgctccggagttgcctctcatactaccttacacatgggatatcttggagaacgacattgaggagtttgcagctctcatgccctccgaggtgtcggaggtggtaacatggaaggccaagtgcaggaatttagtcgcagtgtgcagggaaatttgcattgctgccagctttgcctgcgaggtgcagtatgagctctttgtgcatgctaggcaacaagagatggcacgaaggcaagcagaacgcttggagggaatgcaaacagcagccgacttgagcagctacatagagctggccacacaggcggacatgcgcactacgcgccttctcctaagcctgctcaatgtactggctggccatcagggcgcactccactatcactacttgatggagttggaggtgttcacgtccagctggccttcagtcgacggcgtgaggatgcatctgctgcagctgaatcaaagggctcgtgcccgagagaacgcgttatttggcgatggagttcttactgtggatttgcagcacgactatgtgctggatgcgatacctgtgagcttgctcttgtcaggcgaggattggagcttcaccatcaatccggagcgaaatgcatcggctttcccgacaccgtgggattatgtgcgtattcggtacgtggagatgaagttcacgggagagcaccagccagtgagcaagacgggagagatttacctgttgctcagatcatctgccaacttccaagaccggttggaagagcaggtgctggagtatgaggccgctgttccgctcgtctaccaatacgcctacaacctctcaactggcgcaacgacactgcccaatctaccctcggagagcggcaaattctttcgcatgacgcccttcacgcgctggagactgcggctctctgcatctgcataccagaatgagggcgtgtccttccccacactccctgatcatccagactcagctgatagccccgtccaaattacaatcaccttttacgttactgccctgccacaaatacagtcacgctccctcgatgtataa

SEQ ID NO: 956 - DNA, 2667 bp, Drynaria rigidula whitei
  source 1..2667: mol_type = other DNA
atgcacccgagaggccatgacggaatcaggatccccctgcagcaggccggcggtgatgattatgcagaggagaggcagatgagaccgaggttcaaggccaatggtctggagctggactacgagaagatttacgcagggtcaaactcgatagcaagggaggtgggtctgaacaaggtaaaatgcggcgaggtgatggccatccaccggatgtttttccggctagacactttatcccaagagctgttgcgacaaccggagctggttcagcgtctcatcgtggttgctgatgtggtagagattgagggctctaatgccacactctcgctgcccgcctcttctcttgtgctcatcttttgccgcatcctcatcctcaaaagcaaggacgtggtcctcgaccttggcaattgggatttgagggttgctaccacttctccgcttcaccgctgctctatccgcgctcaacgagttgtcattgcttcgggctccatctctgcctctctgctcattcaggtgaaacataaactcgaatggagcgatggcactcatcttgatcagtgttttggtcgtccattctccttcattgcatctgagatcaactcttctgctacaatcaccactaggactacctctgctatgcggtcaatcaacacctggccgggtacagcacccgtgtctaacttcattcaagtgaactctgaacagttcaatgtgcttgtaaatgcagtcccatggaagggtgtcgtcgactgccaagctgctttgccttcattagatgatctgctgcatcctgatgttattagtggcattcaatctaccctacttattgtagaaaccatccttaactttcagactgacaatccggccattattatcctagcacgacagcatgctgaatggattgtggacagcttacttcaggtggtgcatttgccaaactctacagttggtgtttctgaggtaaaaactcttttggcgcgtgcgcaaatgctcatgaagctgcccacggacggaagccagcatttaagagttccattactggcttatggtgagtaccaagaagatattgagcggctgctcagaaatgcagaggcgtacgaccaagagtacagagcgcttacccgattcgtacagctagtcgagatcataggcagcgagttcctgcagctgagcaagtctctcgcccaaagggagagggacatagaagcattcgagtccttggttgtcattcgcaagcaaagcgagctggatcaggccattaggagaatgaactcattgatgacagaaattgagagacgaagttttgagatggccgacgccaaagccaggatggaagagggtttgcaggactacaacagaaggcaattgactagggcaatctttggaatcctaggagctttactgcagctttgcgcatccctgaagtttggtggtggggcggacattgcggggggcattgcaacaacagttcccgcagcaatagacctgatacatgcggtgcaagatgcaagtgcaagtaccaagcttttggccatatcgcagacattaatggatttagagaagatagttgatgttgtaaatgcagtgaatgcgctagtggagagcgccacagagctggaggacatcatacatgctccggagttgcctctcatactaccttatacatgggatatcttggagaacgacattgaggagtttgcagctctcatgccctccgaggtgtcggaggtggtaacatggaaggccaagtgcaggaatttagtcgcagtgtgcagggaaatttgcattgctgccagctttgcctgcgaggtgcagtatgagctctttgtgcatgctaggcaacaagagatggcacgaaggcaagcagaacgcttggagggaatgcaaacagcagccgacttgagcagctacatagagctggccacacaggcggacatgcgcactacgcgccttctcctaagcctgctcaatgtactggctggccatcagggcgcactccactatcactacttgatggagttggaggtgttcacgtccagctggccttcagttgacggcgtgaggatgcatctgctgcagctcaatcaaagggctcgtgcccgagagaacgcgttatttggcgatggagttcttactgtggatttgcagcacgactatgtgctgaatgccatacccgtgagcttgctcttgtcaggcgaggattggagcttcgccatcaatccggagcgaaatgcatcagcgtttccgacaccgtgggattatgtgcgtattcggtacgtggagataaagttcacgggagagcaccagccagtgagcaggacgggagagatttacctgttgctcagatcatctgcgaacttccaagaccggttggaagagcaggtgctggagtatgaggccgctgttccgctcgtctaccaatatgcctacaacctctcaaccggtgcaacgacactccccaatctaccctcggagagcggcaaattctttcgcatgacgcccttcacgcgctggagactgcggctctctgcatctgcataccagaatgagggcgtgtccttccccacactccctgatcatccagactcagctgatagccccgtccaaattacaataaccttttacgttactgcccttccacaaatacagtcacgctccctcgatgtataa

SEQ ID NO: 957 - DNA, 2664 bp, Cyrtomium clivicola fortuni
  source 1..2664: mol_type = other DNA
atggagtatagcagcttgtatggtgatgtgaaccaagtgagcctgaggttccagaacactgagttctctgaggtcatggtggtgcatcggatgtatgtgcgcctggaggagcttgacatgacgggggtggagggcatcgagaaggtgaaacgcctgtacgtgctggcggacgtggtggagctgccttccagagccaccacggtgtttgagtatgtgcgccttcccgctaccatttcagcgattatcctctgccgcgttctatatatccctgaagttcagaggctctccggctcatctttcgttgctcaatgctcgctcgacttcccgtttatgcgcctccatgtcgtcggaagaagcgagggtggtacgggtgttctgcaagccttttcctctgacgccaccgccagcaatattggcgtctacctccatgctgaccgcttcatctaccgccaggccacatctccggccagcgactttgtctttcccctggatgtaagggtcagctttggcagctctacctactccacaaccgccgttcccgactggcaaaaccttaatgtctccaacatccggtacgggccgcagcacctgtccaggggcccacccctcacatcctcagactctgacttgcacagatctgacgagatcgagctcctggcccggcaagatatttggagccctcttctacacgttgcgtttaacccgaatgcaccacctggcaatgtcccaggtacgcagggactattccaaccctcctctgcatgcagcttcttccatgtgccaccaccggatgtccctgcaaatgtgctcactgatccttccatcatcttgggcctgcaaatgaacatgctcattgccgagcttgtcttggctgctcacaattcgccgcaagtcatgaacgtcgtcactaagcatgtgctatggctcaacaagatcttgcttcaggttgcttcacccaatgatgatattttagcactcttgtttcgtatccaagcattcatgaagatggcaaagcaaccgcggtttgtggttccacggttgcagtaccacatgtacagtagtcttatcaatcgaatggtgcaagtagcccagaattatgaccaggagctcaagcaactcaagcttttcattgcacaaaatgagattttgggaagctatttgctagaacaaaataaggctttcgcagaaagggagaaggaaatgagtgcttttcactcgcaagtcgtgtcgatgaggagctctgagcttaggtctgccatagaatcgatgaacacgctgagtttgcaaatgcaaacagagagtgaggcgatgaacgaagcccaggagaacatggttgaagcaattcaagaatatgaaaggaaattacttgcaagagctctattttcagtgattgcggcaatagcaagtgttgctcttgcatttgccactggtggtgcaactgcaccaggggcagtggcagcagccggaggggctgtctctgcagcaggtaggttggcagaagggctccaaaaggttgtggacatcctacaaggcttgcaagcggtcatggaggttgtggtagccataagagacatcgtagaatcattggaaaacatgggtcaactagtagcagctcctgagatgccagagctgccaacagatgcggactggttaatttttgtaaatgaggtggaggcagtggcagagcaagtgccaacagaagtggcagaggtcccagtgtggaaggctaagtgcaagaatgtggccgtgctagggcaagcgatgtgcaccacagcagcatatattagtgagctacagtatgagataacggtggaagagatgctacaagaaattgcacaacgtcaagcagacaggttagtggggatatcagcagcagatcttttgagctacacagagatggcatcacaaatagacatgcgtacaacccgaatcctccttgagctcatcaagatgttgtacattcaaaatgcagcaattaagtacgagtacttgtatgatgctaatgagaagcttaattcatggccagtgagcatggagactgtatggaccatgctcttgcaacaagagaatgcagctctcttgggcttgctagacttggggcccaccaatgatttcgcagtaacctatgttgttaaagacatacctgtcaagttgttagtagatggttatgattggaattttgagatctcggtggaggattttgcaatctttccatcaggatggtctcgtgttcgcatacgatatgtcgagcttaaatttgaccaacaaggtactgatagcaggaacattgtcatccaccagccaagcactaacactggtttagtctacatgctcttacaaggctctcgtttcctccatgaccgcaaacgtgaggaggtgatggactatgaggcaagcatgggacctgtatatgcatatgcctatgacctcaacactggtgcaaccactctcaccaacatcccctcacagcaacatgccaacacatttatgcaaatgacaaccttcaatacttggagacttcgcctctctgcctctgctatggaaaatcagggattggtgtttcctacagccacttctcctgacaatactacccaaatttccatcacattctatgtcactgctattcgacgcatagatcatcgacaagaggatgatgtggagtaa

SEQ ID NO: 958 - protein, 886 aa, Aglaomorpha Roberts
MEYSSLYGDVNQVSLRFQNTEFSEVMVVHRMHVRLEELDMTGVEGIEKVKRLYVLADVVELPSVATQVFQYLRLPASISAIILCRVLYIPEVDQRAGMAQCSLDFPFMRLHVVASAHENGGGVMQAFSSDATPSNIGIYLHADRFIYRQATSPASNFVLPLEVRVSFGSSTLSGTTIRPDWQNLNVSNISYGPQHLSRGAPLTSSDSDLQRSDEIELLAEQDNWSPLLHVAFNPNAPPGNIPGTQGIFQPSSACSFFHVPPPNVPANVLTDPSIILGMQMNMLIAELVLAAHNSPQVMNVITKHVLWLNKILLQVASPNDDILALLFRIQAFMKMAKQPRFVVPRLQYHMYGSLINRMVQVAQNYDQEFKQLKLFIAQNEILGSYLLQQNRAFAEREREMSAFHSQVVSMRRSELQSAIETMDNLSLQMQSESEAMNEAQEDMVEAIQEYERKLLARALFSVIGAIASIALAFATGGATAPGAVAAAGGAVAAAGRLAEGLQRVVDILQGLQAVMEVVVAIRDIVESLKNMGQLVEAPEMPEMPTDADWLIFVNEVEAVAEQVPTEVAEVPVWKAKCKNVAVLGQAMCTTAAYISELQYQITVEEMLQEIAQRQADRLVGISAADLSSYTEMASQIDMRTTRILLELIKMLYIQNAAIKYEYLYDANEKLNSWPVSMETVWTMLLQQENAALLGLLDLGPTNDFTVTYAVKDIPTKLLVDGFDWNFEIAVEDFAIFPSGWSRVRIRYVELKFDQQGADSSNIVIHQPSTNTGLVYMLLQGSRFVHDRKREEVMDYEASMGPVYAYAYDLNTGATTLNNIPSQQYANTFMQMTPFNAWRLRLSASAMENQGLVFPTATSPDNTTQISITFYVTAIRRIDHRQEGDVE

SEQ ID NO: 959 - protein, 887 aa, Humata termanii
MEYSSLYGDLNQVSLRFQNTELSEVMVVHRMHVRLEELDMTGVEGIEKVKRLYVLADVVELPPIATTTFEYLRIPATTSAIILCRVLYIPQVDQRNPHLDAQCSLDFPFMRLHVVGSAHPNGGGVMQAFSSDATASDIGIYLHADRFIYRQATSPASNFVLPLDVRLNFGSSTFSSDVRPDWQNLNVSNISYGPQHLSRGTPLTSSESDLQRTDEIELLALPDVWSPLLHVAFSPNAPPGNIPGTQGQFQPSSACSFFHVPPPDVPAKVLTDPSIILGIQMNMLIAELVVAAHNSPQVMNAITKHVLWLNKILLQVASPNDDILALLFRIQAFMKMAKEPRFVVPRLQYHMYGSLINRMVQVAQNYDQEFKQLKLFIAQNEILGRYLLQQNRAFAEREREMSAFHSQVVSMRRSELRSAIESMDTLSLQMEAESEAMNEAQESMVEAIQEYERRLLARALFSVIAAIASVALAFATGGATAPGAVAAAGGAVSAAGRLAEGLQRVVDILQGLQAVMEVVVAIRDIVDSLQNMGQLVDAPEMPEMPTDADWLIFVNEVEAVAEQIPTEVAEVPVWKAKCKNVAVLGQAMCTTAAYISELQYQITVEEMLQAIAQRQADRLVGISAADLSSYTEMASQMDMRTTRILLELIKMLYIQNAAIKYEYLYPANERLDSWPVSMETVWTILLQQESAALLGLLDLGPSNDFTVTYAVKDIPTKLLVDGFDWNFEIAVEDFAIFPSGLSRVRIRYVELKFDQQGADSSNIVIHQPSTNTGLVYLLLQGSRFIHDRKREEVMDYEASIGAVYAYAYDLNTGATTLPNIPSQDQANTFMQMTPFNGWRLRLSASAMENQGLVFPTATSPDNTTQITITFYVTAIRRIDHRQEGDVE

SEQ ID NO: 960 - protein, 876 aa, Pellaea rotundifolia
MEYGSLYGDVNQVSLRFEKTEVSEVMVVHRMHVRLEELDMSSDKLKRLYVLADVVELPSQRQTIVIPATVSAIIMCRVLYIPYIWTVVDNCTLVLPHMRFRVVETSNIAPRTGQFFALPPSDAAVDNDVGSFGGLYIHADRFIYRQATSFTSDWVQPLGLRVRGSSTFSSTFRPDWPETLPVNNLNQTITLSLGSFLTPSDSDLQRSDEIEFLQTEPQRVQVVVDRGPGSQTGLVLLVENSPEISVFPAPSLEHVPADVLADPSIILGMQMNMLSAELVLAAHNSQQVIKAVSKHVEWLNKILLQVASPSDDILALLFRVQAFIKMAKQSRFVVPRLQYHAYSNLINRMVQVAQVYDQELRQLRLFIAQNEILGSYLLQQNKAFAEKEKDMSAFHSQVVSMRRSELSSTIEMMGRLSSQMETESEAMDEASDSMVAAIQEYERKQLARALFAVLGAIASVALAFATGGATAPGAVASAGAAVTAAGRLAEGLRRVVEILEGLQAVMEVVAAIRDLVESLENMGQLVEAPEMPEMPTNADWLIFVNEVEAVAEQVPEEVSEVPVWKAKCKNVAVLGQEMCTTAAHISELQYQIRVEEMLQEIAQRQADRLMGISAADLSSYTEMATQIDMRTTRMLLQLIKMLYIQNAAIKYEYLYPASERLNSWPVTMPTVWTMLLQQENAALLGLLDLGPSNDFTVTHVVKDIPVKLLVDGYDWHFEIPVEDSAIFPAGWSRVRIRYVELKFDKQGTDSNIVIHQPSTNTGEIYMLLQSSRFLSDRKREEVMDYEASTGLAYAYAYDLSTGATTLTNIPSEAHANTFMQMAPFTAWRLRLSASAMENQGLVFPTATSPDNTTQISITFYVTAIRRIDTRRQRADA

SEQ ID NO: 961 - protein, 893 aa, Adiantum hispidulum
MEYSSLYGDVNQVSLRFEKTEVSEVMVVHRMHVRLEELDMSSDKLKRLYVLADVVELPSQRSTIVVPATVSAIIICRVLYIPYIFTVLENCSFFLSLMRFRVVETRIEPPRTGQFFALPSADAVDDGVGGFRGLYILADRFIYRQATSFTSDWVQPLSLRVQGSSTFSSTFRPEWPETLPVTNLNHTVTLSLGSFLTPSDSDLQRSDEIEFLPTEPQRVQVVINRGPGSQTGLVLIPENSPEISVFPAPSLEHVPADVLADPSIILGMQMNMLSAELVLAAHNSQQVIKAVTKHVEWLNKILLQVASPSDDILALLFRAQAFIKMAKQSRFVVPRLQYHVYRNLINRMVQVAQDYDQELRQLRLFIAQNEILGSYLLQQNKAFAEKEKDMSDFHLQVVSMRRSELSSTIEMMGRLSLQMETESEAMSEAQESMVEAIQEYERKQLARALFAVIGAIASVALAFATAGATAPGAVAAAGAAVTAAGRLAAGLQKVVEILEGLQKVMEVVAAIRDLVESLENMGQLLEAPEMPEMPTNADWLIFVNEVELVAEQVPEEVSEVPVWKAKCKNVAVLGQEMCTTATHISELQYQIRVEEMLQEIAQRQADRLMGISAADLSSYTEMATQIDMRSTRMLLQLVKVLYIQNAAIKFEYLYPASERLNSWPVTMPTVWTMLLQQENAAILGLLDLGPSNNFTVTHVVKDIPVKLLVDGYDWHFEIPVEDSATFPAGWSRVRIRYVELKFDKQGTDSNIAIHQPSTNSGLIYMLLQSSRFLSDRRREEVMDYEASMGLAYAYAYDLSTGATTLTNIPSEAHVNTFMQMTPFTAWRLRLSASAMENQGLVFPTATSPDNTTQISITFYVTAIRRIETRRQQADAEGGEGDRLEGGVGFGQPS

SEQ ID NO: 962 - protein, 852 aa, Adiantum polyphyllum Amaretto
MDYSTLYTDLNQISMPLDRVEFSEVMVIHRMYLRLSDLNVGELPGAESVKRLYVFADVVELATFAYPQLLHTRMPGSVTVIILCRLLQFPTDGSFSAWLELPFMELHTLIEQHKSEIKAADDAKWGTYVHAEEVQLSPLFNGWPYLVVEAQRCIITAAMHNTFNRPGWVRSVTQFTTDQSGRVDTTLLARTEFGHIYLPLETDSPTAFSVSHRQSTNLPVEYTGIPVEVVTDPNILMGMQTSVHIAELVKACYPSPELVSAVGVHVNWLNEVLLRVVQNESQLQGTEAYNECLALLGRIQCVMKMGPFVSVVPQLQYRMYGSLIRQMAQVAQNYDQDFRQLKLFIAQNQILGSYLLQQNKAFADREVQMEGFHSAVISQRRQELDDAIAKMDRLSLQMEEEDRAMEQARKEMEEGLKQFQNEQVARAVFAVLKSVAMIALAFVTAGATAPGAAASAAQAVSIAGQAAQALQRVVEILEGLEAVMEVVAAIKDLVDALDQVSQIVDAPPMPDMPSEADWSIFVNEIEAVAEGMPTEVSEVPAWKAKCKNVAALGREMCITAEQISQLQYDIWVQGLLRDIAQSHADRLAAIQPANLTNYLEMATQMDMRTTRILIGLLNIMRIQNAALMYEYLLTPTQLTAWPLRMDTVANLLITQESAALSGLAQLGPPSDFTSRHVVKGIPVSLLLDSGDWEFEIPVQGGMSSFPSSWTRVRIRHLEMHFVQEASGGGEIIHQPATQTGTVYILLQGSTVFHDRRREEVMTFQAAVPLNYHYAYRLDTGEATLTNEPSEQFANTFMQMTPFTHWRLRLSASAAENEGLAFPTATAPDSTTEIAITFHVTAIRQIDWRQEEE

SEQ ID NO: 963 - protein, 857 aa, Adiantum polyphyllum Amaretto
MATVDYSTLYRDLNQISMPLDRVEFSEVMVIHRMYLRLSDLNVGELPGAERVKRLYVLADVVELATFAHPQLLNTRMPGSVTVIILCRLLQFPTDGSFAAWLELPFMELHTLIEQYRSEIKAADDAKWGTYVHAEEVQLSPLFNGWPYLVVEAQRCIITAAMHNTFNRPGWVRSITQFTTDQSGRVDTTLLARTEFGHIDLPLETDSPTAFSVSHRQSTNLPVEYTGIPVEVVTDPNILMGMQTSVHIAELVKACYPSPELVSAVGVHVNWLNEVLLRVVQKESQLQGTEAYNECLALLGRIQCVMKMGPFVSVVPQLQYRMYGSLIRQMAQVAQNYDQDFRQLKLFIAQNQILGSYLLQQNKAFADREVQMESFHSAVISQRRQELDDAIAKMDRLSLQMEEEDRAMEQARKEMEEGLKQFQNEQVARAVFAVLKSVAMIALAFVTAGATAPGAAASAAQAVNIAGQAAQALRRVVEILEGLEAVMEVVAAIKHLVDALDQVSQIVDAPPMPDMPSEADWSIFVNEIEAVAEGMPTEVSEVPAWKAKCKNVAALGREMCITAEQISQLQYDIWVQGLLRDIAQSHADRLAAIQPANLTNYLEMAIQMDMRTTRILIGLLNIMRIQNAALMYEYLLTPTQLTAWPLRMDTVANLLITHESAALSGLAQLGPPSDFTSRHVVKGIPVSLLLDGGDWEFEIPVQGGMSSFPSSWTRVRIRHLEMHFVQEASGGGEIIHQPATQTGTVYILLQGSTVFHDRRREEVMTFQAAVPLNYHYAYRLDTGEATLTNEPSEQFANTFMQMTPFTHWRLRLSASAAENKGLAFPTATAPDSTTEIAITFHVTAIRQIDWRQEEEEE

SEQ ID NO: 964 - protein, 858 aa, Adiantum polyphyllum Amaretto
MATVDYSTLYRDLNQISMPLDRVEFSEVMVIHRMYLRLSDLNVGELPGAERVKRLYVLADVVELATFAHPQLLNTRMPGSVTVIILCRLLQFPTDGSFAAWLELPFMELHTLIEQYRSEIKAADDAKWGTYVHAEEVQLSPLFNGWPYLVVEAQRCIITAAMHNTFNRPGWVRSITQFTTDQSGRVDTTLLARTEFGHIDLPLETDSPTAFSVSHRQSTNLPVEYTGIPVEVVTDPNILMGMQTSVHIAELVKACYPSPELVSAVGVHVNWLNEVLLRVVQKESQLQGTEAYNECLALLGRIQCVMKMGPFVSVVPQLQYRMYGSLIRQMAQVAQNYDQDFRQLKLFIAQNQILGSYLLQQNKAFADREVQMESFHSAVISQRRQELDDAIAKMDRLSLQMEEEDRAMEQARKEMEEGLKQFQNEQVARAVFAVLKSVAMIALAFVTAGATAPGAAASAAQAVNIAGQAAQALRRVVEILEGLEAVMEVVAAIKHLVDALDQVSQIVDAPPMPDMPSEADWSIFVNEIEAVAEGMPTEVSEVPAWKAKCKNVAALGREMCITAEQISQLQYDIWVQGLLRDIAQSHADRLAAIQPANLTNYLEMAIQMDMRTTRILIGLLNIMRIQNAALMYEYLLTPTQLTAWPLRMDTVANLLITQESAALSGLAQLGPPSDFTSRHVVKGIPVSLLLDGGDWEFEIPVQGGMSSFPSSWTRVRIRHLEMHFVQEASGGGEIIHQPATQTGTVYILLQGSTVFHDRRREEVMTFQAAVPLNYHYAYRLDTGEATLTNEPSEQFANTFMQMTPFTHWRLRLSASAAENKGLAFPTATAPDSTTEIAITFHVTAIRQIDWRQGEEEEE

SEQ ID NO: 965 - protein, 860 aa, Adiantum polyphyllum Amaretto
MATVDYSLLYRDLNQISMAVDKVEFSEVMAIHRMYVNLADLDVGELVGAETVKRLYVFADVVELAPRQLPPGDQTRMPGSVTVIILCRLLHFPTGELPVPAFLHLSFMKLHAIQREHDMSEIAAADGMNWGVYIYGEEVQLTGPFSGYLLSVRTDRAIITSAIHNLIEQPGRVTSSINITWGQFEPNTTSMLATPAGWPSGQFFHLWGVSPSAFLVLPSISTNVSFTSIPVEVVTDPNILLGMQTTVQIAELVKAGHPSPDIVSAVAKHAIWLNKLLLQVVQNETHLRGTESYNECLALLGRAQFVIKMGRYGLVVPQLQYKMYGSLIKQMAQVAQNYDQDFKRFKLFIIQNQILGSYLLEQNKAFADRELQMEGFHSAVISQRKGELNTAFEKMDRLSLQMEDENAAMEQAQKDMEEGLRQFQNRQVARALFAVLKAVALIGLAFVTAGATAPGAVASAGQAVSIAGQAAQGLRRVVEILEQLEAVMEVVAAVKDLVNSLEQVGQLVQAPEMPDMPSEADWSIFVNEIELVAEGMPTEVSEVPAWKAKCKNVAALGREMSITAVQISELQYDIWVQGMMRDIAQSQADRLAAIRPVDLTNFLEMATQMDMRTTRMVLGLVNMLRIQNAALMYEYLLTPTELRAWPLGMDTVSNLLIAQENAALLGLTQLGPSSDFTSTHVVKGIPVSLLLDGEDWEFEIPVQADMSSFPSSWTRVRIRHLEMHFVAQEMNGASGGEIIHQPATQTGTVYILLEGSTTFHDRRRDEVMTFQAAAPLSYQYAYRLDTGETTLSNQPSEHFANTFMQMTPFTRWRLRLSASAFENAGLAFPTATALDSTTQIAITFYVTAIRQIDRRHELEE

SEQ ID NO: 966 - protein, 850 aa, Asplenium nidus var plicatum; identical to SEQ ID NO: 803

SEQ ID NO: 967 - protein, 850 aa, Asplenium nidus var plicatum
MASFPDYREIYKNVNQVTRAVASRQGSEVMSIHRMYFKLDELEVERLTEADTVKELVVFADVVGIEGQQVKLPASRTVTIVCHILHVKQEAVKLRFDSFGPVDCDRGWLPGIGEAALILSNSPQVRLSIYAQQVVCNTTRAVVQVAHPVTVSQTVSPHNPSRYAIPGTMKWQVEIASDQPDLSAAERSYELRTERFWDVMEKVWRIDQQEWSLFTHLLQGPVSIPPAILGDSNIILGMQSTLLIAELVLSYQTRADDTVSAANAHLQWLITNLLQVLDDNSLDKETREQLLALQARAELASKLPLDGSHTLIVPRLEYGQYQGLIKSMAAVAEAYNSEFMAVNLFIQQNEILGSYLLQQNKAFAARERDMDTFHGLALARKQQELRTAQESMEDLNAQLTQQTEAMDQAKRDMDAGFKKYRDEQVAKAFFSVLKGVLAIGAAIFTGGAAAGPAVNAGVDAVKGVSSLAGKLDMVIDIMERMEKVMEVLNAVNDLVTALSEINKMVEAPEMPSVPSTYEWDIFENEMEEVAESMPTEVTEARTWKTKCKNVAAVCRAICNTASYIGQLQYDVFVQSNQALIAGKQAERLEAIQPADLTNFLEMATQMDMRTSRMLLNLLKVMTIQNAALLFHFLLPPVPFTGWVTVDMVRNALVKHEADALAARERLGPSTDFVQTYVMSDIPISLLLDGDDWIFTIDPADGSTFPLSWSRVRIQYLEMKFTGGEEFHKPTTSSGRVYILLQASRNFQDRLHGDVLHFEAAVPLRYQYAYDLQSGETTVSNRPSQQHDGEYMQMTPFGQWRLRLSASAVENQGLAFPTAVATDLDSSTTQISITFHLTAVRRIDTRALVEL

SEQ ID NO: 968 - protein, 877 aa, Adiantum raddianum Gracillimum; identical to SEQ ID NO: 798

SEQ ID NO: 969 - protein, 881 aa, Campyloneurum angustifolium
MAVATLRAAEYRELYKDLNQVSEGLILEMMEFSEVMVIHRMYLRMVELDVGHLEGAEKVKHLYVFADVVEMAPASSTVRLPGSVSVSIVCRVLWLPVPVSNIPLIAFPHLKLRANFASGSGNRQFNVYRRTDGGSEVDEGLALCIHAVDIQLTGVPAFAVNSPAFYLFTDPRNLTMPAEGAITFGDPDRQVPVLMFRMYAEAQRLSGVNTGIIRISPPFSNNLRIATTVHAPPTVTLLTIDTHHPHGPGFWILRGIPDSLLKSDQLMLLMQMSLLIAELAELAHPSSETRAAVLEHVEWLSGVLIDGASSTEGTQMHQEYLELLFRAQYLLKTTSSSRSLVVPQLQYALYSPLINRMAQVAQIYDDAVNQFKLFIAQNRILGSYLLEQNKASAERERDLEVFHAELISQMTIELNSTLLKMDQLSLQMEAQTADMEQAEREMEEGLRRFRNRQVARAIFSVFRAIAAVALTVVTGGAAAPAAMNAARGAVSVAGQAARGLQSVLEILEGLQVVMEVVAIIKELVESLQDLGKLVEAPDMPEMPTDADWAIFVNEVEAVAAEMPEEVSEVVTWKTKCKNVAAVGRELMTTAAYISRLQYDIKEHSMLQEIAKRHANRLANTQAANLSSYTEMVIQMEMRTMRIIISLVKVVYVQNAALMYQYLSQPTQMRQTWPVSMETVWRMLTQREHASVLGLIRLGPSFDFERIYVVRDIPVSLLLTGEDWEFEIPVSDETTFPSSWTRVRIKHLEMKFVHDDGSAAAGHHQPITDTGKVYILLQSSRVFHDRDQAGREPLSYEAALPLDYQYAYHLDTGETTLSNLPTTQFINTMTPFTNWRLRLSASALENQGLDFPTARQQGAVNQDATTQIAITFHVSAIRQISF

SEQ ID NO: 970 - protein, 882 aa, Campyloneurum angustifolium
MAVATLRAAEYRELYKDLNQVSEGLILEMMEFSEVMVIHRMYLRMVELDVGHLEGAEKVKHLYVFADVVEMAPASSTVRLPGSVSVSIVCRLLWVPAQVSDIPLIAFPHLKLRVILPRGPVGVVFNQFAVFRRTDGGSEVDEGLALCIHAADIQLTGVPASAVNSAAFYLFTDPHNLTMTAEGAITYGDLDRQVPVLMFRMYAEALSLSGVNTGIIRIPPPFINNLRVATTVHAPPTLLTLDSYMPIPPGFWILRGIPDSLLKSDQLMLLMQMSLLIAELAELAHPSSETRAAVLEHVEWLSGVLIDGASSTEGTQMHQEYLELLFRAQYLLKTASSSRSLVVPQLQYALYSPLINRMAQVAQIYDDAVNQFKLFISQNRILGSYLLEQNKASAERERDLEVFHAELISQMTIELNSTLLKMDQLSLQMEAQTADMEQAEREMEEGLRRFRNRQVARAMFSVFRAIAAVALTVVTGGAAAPAAMNAARGAVSVAGQAARGLQSVLEILEGLQVVMEVVAIIKELVESLQDLGKLVEAPDMPEMPTDADWAIFVNEVEAVAAEMPEEVSEVVTWKTKCKNVAAVGRELMTTAAYISRLQYDIKEHSMLQEIAKRHANRLANTQAANLSSYTEMVIQMEMRTMRIIISLVKVVYVQNAALMYQYLSQPTQMRQTWPVSMETVWRMLTQREHASVLGLIRLGPSFDFERIYVVRDIPVSLLLTGEDWEFEIPVSDETTFPSSWTRVRIKHLEMKFVHDDGSAAAGHHQPITDTGKVYILLQSSRVFHDRDQAGREPLSYEAALPLDYQYAYHLDTGETTLSNLPTTQFINTMTPFTNWRLRLSASALENQGLDFPTARQQGAVNQDATTQIAITFHVSAIRQISF

SEQ ID NO: 971 - protein, 885 aa, Campyloneurum angustifolium
MAVATLRAAEYRELYKDLNQVSEGLILEMMEFSEVMVIHRMYLRMVELDVGHLEGAEKVKHLYVFADVVEMAPASSTVRLPGSVSVSIVCRLLWVPAQVSDIPLIAFPHLKLRVILPRGPVGVVFNQFAVFRRTDGGSEVDEGLALCIHAADIQLTGVPASAVNSAAFYLFTDPHNLTMTAEGAITYGDLDRQVPVLMFRMYAEALSLSGVNTGIIRIPPPFINNLRVATTVHAPPTLLTLDSYMPIPPGFWILRGIPDSLLKSDQLMLLMQMSLLIAELAELAHPSSETRAAVLEHVEWLSGVLIDGASSTEGTQMHQEYLELLFRAQYLLKTASSSRSLVVPQLQYALYSPLINRMAQVAQIYDDAVNQFKLFISQNRILGSYLLEQNKASAERERDLEVFHAELISQMTIELNSTLLKMDQLSLQMEAQTADMEQAEREMEEGLRRFRNRQVARVMFSVFRAIAAVALTVVTGGAAAPAAMNAARGAVSVAGQAARGLQSVLEILEGLQVVMEVVAIIKELVESLQDLGKLVEAPDMPEMPTDADWAIFVNEVEAVAAEMPEEVSEVVTWKTKCKNVAAVGRELMTTAAYISRLQYDIKEHSMLQEIAKRHANRLANTQAANLSSYTEMVIQMEMRTMRIIISLVKVVYVQNAALMYQYLSQPTQMRQTWPVSMETVWRMLTQREHASVLGLIRLGPSFDFERIYVVRDIPVSLLLTGEDWEFEIPVAEETTFPSSWTRVRIKHLEMKFVHDDGSGAAGHHQPITDTGKVYILLQSSRVFHDRDQAGREPLSYEAALPLDYQYAYHLDTGETTLSNLPTTQFINTYMTMTPFTNWRLRLSASALENQGLDFPTARQEGAVNQDATTQIAITFHVSAIRQISF

SEQ ID NO: 972 - protein, 845 aa, Blechnum cartilagineum Sw; identical to SEQ ID NO: 813

SEQ ID NO: 973 - protein, 845 aa, Blechnum cartilagineum Sw
MGNASSTDYEHIYRNANNISRMVATPVCSEVMSVARMFVRLRDLDASRLKNPEVVKELYVVADVVDMEEYNDLTLPGSERIYLICRVFTWRRNQPPPTTVRIRTPWLNLSSCSKLEICPLRHDRQAQTSPAFQCFARAKHSTTSEIAPAVLFLHAAHIYTSNPDTDTSHLNVVLQAQESAQYTLMSADQTPSGEEIFWEVETYPLLPRSDLNSTILSAQEANVLVIELILSYITHATETVKQASLHLEWLNKLLNYALNDTSSASTGSLDDEALDRQLHNLSFQVQFLLNQPPTGAGLIVPRLQYYAYSNLVGTMARIAENYDKEFRQFSLFIEQNDVLGTYLLQQNKAFAEKEREMEVFHLELQQVKKDDLTRALAKLERLEVDMREMNAAMEQAERDMEADLVQYRNRQVARAVFSVIGAIAQLGLAFFTGGATAGGAVAGVANAVSQVTDSAALASLRRISETLEKLVLVTEFLVAMRDLLNAVMDIHQGPPEVPTLPEMVSEAEWAIFENEIEAVAAGMPAEVSSVLTWKTKCKNVAALGREMITLATIIVDLQHDIKVHGLMREMAQNHAQRLKALQPVDLKNYQEMATELDMRTTRMLLGLLEVLSLQNAALRYQYLLPPSPVTIESTSLTMSTAWTLLLQHESASVISLADLGFATDQEVAYIVKGIPVGLLLDGEDWDFPISVRDIAEGAAFPADWSRVRISHVEMKFVKPGAAPVDEEETVHQPTTNTGKVHMLLRGEQLFADRKRGESLKYEAAVSMEYQYAYRLDTGETTQSNRPSQEFGDKLFMQMTPFTRWKLRLPTAANENRGLAFPTASAENATTQITISFHVSAIRTIF

SEQ ID NO: 974 - protein, 817 aa, Blechnum cartilagineum Sw; identical to SEQ ID NO: 815

SEQ ID NO: 975 - protein, 851 aa, Adiantum pedatum; identical to SEQ ID NO: 793

SEQ ID NO: 976 - protein, 371 aa, Adiantum pedatum
MDVDYAAIYKDVNQVTRTVATSQCSEVMAIQRLYVRLNDLDVKGLRNVEVVKQVVVFADVVEVEGGDVLELPGSTQITIVCRVLHTKHPSGAVIRLSSLAPVKCRGREHRHASGPRTHSVTPMNGQLASDGQIVTILATEVVAPAGASLQVQCPVLVDATIYDSDGYHPDFFYDLNGTASWSSLPFGGATGTTAATARSFQTTTVAPLSWITWTMNEVDWQPSFRVVLPETLPPRLLVNSSILLAMETNILASELISEFQREAVQTTAAVHQHTIWLDDQFQLAVRSSQRQDQLQSQQSRNLHFRVQSLLKLDRMDSNAPLVVPPLQYEQYDKLINLMTQAAQSYDNDFKNLNLFMQQNEVSNSIGIDRLP

SEQ ID NO: 977 - protein, 874 aa, Pteris cretica Roweri; identical to SEQ ID NO: 841

SEQ ID NO: 978 - protein, 906 aa, Pteris cretica Roweri
  REGION 464..465: note = misc_feature - Xaa can be any naturally occurring amino acid
  SITE 474: note = misc_feature - Xaa can be any naturally occurring amino acid
  SITE 484: note = misc_feature - Xaa can be any naturally occurring amino acid
  SITE 572: note = misc_feature - Xaa can be any naturally occurring amino acid
  SITE 574: note = misc_feature - Xaa can be any naturally occurring amino acid
  SITE 627: note = misc_feature - Xaa can be any naturally occurring amino acid
  SITE 630: note = misc_feature - Xaa can be any naturally occurring amino acid
  SITE 650: note = misc_feature - Xaa can be any naturally occurring amino acid
  SITE 657: note = misc_feature - Xaa can be any naturally occurring amino acid
  SITE 706: note = misc_feature - Xaa can be any naturally occurring amino acid
  SITE 745: note = misc_feature - Xaa can be any naturally occurring amino acid
  SITE 768: note = misc_feature - Xaa can be any naturally occurring amino acid
  SITE 777: note = misc_feature - Xaa can be any naturally occurring amino acid
  SITE 786: note = misc_feature - Xaa can be any naturally occurring amino acid
  SITE 788: note = misc_feature - Xaa can be any naturally occurring amino acid
  SITE 790: note = misc_feature - Xaa can be any naturally occurring amino acid
  SITE 808: note = misc_feature - Xaa can be any naturally occurring amino acid
  SITE 818: note = misc_feature - Xaa can be any naturally occurring amino acid
  SITE 834: note = misc_feature - Xaa can be any naturally occurring amino acid
  SITE 843: note = misc_feature - Xaa can be any naturally occurring amino acid
  SITE 869: note = misc_feature - Xaa can be any naturally occurring amino acid
  SITE 873: note = misc_feature - Xaa can be any naturally occurring amino acid
  REGION 878..879: note = misc_feature - Xaa can be any naturally occurring amino acid
MFTQDDDWCVYMYCSPGILDMAGRDHNTDVINYEEIYKAVDEVRRTVVPRSKDAVMIVEGMYVNLNSRIDDGLFTGDSSKPKEVWVVADVVALSNDVKVPTSTERLVILCRILHVDGSYARLFSASQNVILDCDYIQESEAISKSWKVRSTELQIHIYAQCLQAPSSKELMPLCVSIPAHRKYPFFIYVMWGLFGMFDSGRGRMMPALSFPRHENNFLGPLFRSREELEQLERLFVVSLCDEQIPAALLSEAAIVEAMQATLLKAELILTYQTQAHGGATAEMARQHVEWLRSQLKGCISSQQEGQVQLDAGLAALLVRAESLSKMPQRTAYNVVPSLTYKAYRDLINRLATAAKDYDNSFMQMRTLVQSSQMTDSDFETLYKALAQKEKDVDEYHQQLARLKQNELKEVSSSLDVLKCELEKQKQAMDEAEQDANDSNKHIAEYAPLLALNKLISYLQEIKFXXTYCRTERIXDEASCQSCVXSGEGCVCHGGSGVYCGHNCRSSSGGCGGSSERQWKNETSLGATRKDQQVTESHGCHPEAHRLSKSSQGRDRGTGVAKHAHGGRLGHIXEXDYGRGKPARESHQCGQLGSQVQECSSGGQGVHQDRKSHGAAAIRNTGAKFARXGGXEAQGASGGDHLQGQRLRQVXGDSKARXDAAEQFAHQVTTYPGSPACGCVLSFPAGPNTVHRVGGRGHGDSNTDRQXGRHTDEPGQSEQVQRQNNHLQCGGHTSKSVGERRRLGLXHRGPGIRSERSQGLQRLEPCAHXVHDHQVCCXFRQAANSRXRXHXRRHGSVLDASSDRFPRPXEGRQESATVXGGGAIALPIRLQLQHXGGAGRQPPXHQRWGGGFLDAHDALHYMAPLSSYLXSLQXRPQIXXLFCLHNHVHTHRLPCQRHSRRVLSFQM

SEQ ID NO: 979 - protein, 849 aa, Dryopteris marginalis
MAVMDYSEIYRDLNQISMGVDRVEFSEVMVIHRMYVRLADLDVGELAGAESVKRVYVFADVVELAPGTRMQMPGSVTVIILCRLLQFPTDGSQAATLQLPFMKLHALLRERHTSEITAADGMNWGTYIHGEEVQVIIPWSTVNSILRVWADGSSMTSSFHNVFDEPGRIVSTTVFTRPGAPDNTTLSADPGMSILNSFLLHTVSPSAFSVLARQSSNISFTNIPVDVVTDPNILLGIQTNVLIAELVQVCHPSPEIFAAVAEHLNWLNKIMLQVVKNETQLQGTESYNECLALLGRIQSVIKIARLGLVVPQLQYRMYSSLINQMAQVAQNYDREFKQFKLFIIQNQILGSYLLQQNRVFADREQQMESFHSVVISQRKEELDSATTKIERLSLQMEAENDAMEQAKKEMDEGLRKYQNEQVARAVFSVLSAIAQIGLAFITGGATAPGAVASAAQAVSIAGQAARALEKVVKILEQLEAVMEVVTAVKELVDSLEQIGHIVEAPVMPEMPSEADWSIFVNEIEAVAEQMPTEVAEVPAWKAKCKNVAALGREMSITAAHISQLQYDIWVQGMLREIAQSQADKLAAIQPVDLTNYLEMVTQMDMRTSRMLLGLINILRIQNAALMYEYLLTPTQLTAWPLAMDTVGTLLIQQESSALIGLAQLGPPSDYTSTHVVKDIPVSLLLDGDDWEFEIPVQDGTTFPSSWSRVRIRHLEMHFVQAGGDEQPQIIHQPATQTGSVYILLQGSTIFHDRRRDEVMTFEAAVPLNYHYGYRLDTGETTVTNVPSEHFANTFMQMTPFTRWRLRLSASAAENAGLAFPTATAPDSTTQIVITFHVSAIRQIDWRHDE

SEQ ID NO: 980 - protein, 849 aa, Dryopteris marginalis
MAVMDYSEIYRDLNQISMGVDRVEFSEVMVIHRMYVRLADLDVGELAGAESVKRVYVFADVVELAPGTRMQMPGSVTVIILCRLLQFPTDGSQAATLQLPFMKLHALLRERHTSEITAADGMNWGTYIHGEEVQVIIPWSTVNSILRVWADGSSMTSSFHNVFDEPGRIVSTTVFTRPGAPDNTTLSAEPGMSILNSFLLHTVSPSAFSVLARQSSNISFTNIPVDVVTDPNILLGIQTNVLIAELVQVCHPSPEIFAAVAEHLNWLNKIMLQVVKNETQLQGTESYNECLALLGRIQSVIKIARLGLVVPQLQYRMYSSLINQMAQVAQNYDREFKQFKLFIIQNQILGSYLLQQNRVFADREQQMESFHSVVISQRKEELDSATTKIERLSLQMEAENDAMEQAKKEMDEGLRKYQNEQVARAVFSVLSAIAQIGLAFITGGATAPGAVASAAQAVSIAGQAARALEKVVKILEQLEAVMEVVTAVKELVDSLEQIGHIVEAPVMPEMPSEADWSIFVNEIEAVAEQMPTEVAEVPAWKAKCKNVAALGREMSITAAHISQLQYDIWVQGMLREIAQSQADKLAAIQPVDLTNYLEMVTQMDMRTSRMLLGLINILRIQNAALMYEYLLTPTQLTAWPLAMDTVGTLLIQQESSALIGLAQLGPPSDYTSTHVVKDIPVSLLLDGDDWEFEIPVQDGTTFPSSWSRVRIRHLEMHFVQAGGDEQQQIIHQPATQTGSVYILLQGSTIFHDRRRDEVMTFEAAVPLNYHYGYRLDTGETTVTNVPSEHFANTFMQMTPFTRWRLRLSASAAENAGLAFPTATAPDSTTQIVITFHVSAIRQIDWRHDE

SEQ ID NO: 981 - protein, 849 aa, Dryopteris marginalis
MAVMDYSEIYRDLNQISMGVDRVEFSEVMVIHRMYVRLADLDVGELAGAESVKRVYVFADVVELAPGTRMQMPGSVTVIILCRLLQFPTDGSQAATLQLPFMKLHALLRERHTSEITAADGMNWGTYIHGEEVQVIIPWSTVNSILRVWADGSSMTSSFHNVFDEPGRIVSTTVFTRPGAPDNTTLSAEPGMSILNSFLLHTVSPSAFSVLARQSSNISFTNIPVDVVTDPNILLGIQTNVLIAELVQVCHPSPEIFAAVAEHLNWLNKIMLQVVKNETQLQGTESYNECLALLGRIQSVIKIARLGLVVPQLQYRMYSSLINQMAQVAQNYDREFKQFKLFIIQNQILGSYLLQQNRVFADREQQMESFHSVVISQRKEELDSATTKIERLSLQMEAENDAMEQAKKEMDEGLRKYQNEQVARAVFSVLSAIAQIGLAFITGGATAPGAVASAAQAVSIAGQAARALEKVVKILEQLEAVMEVVTAVKELVDSLEQIGHIVEAPVMPEMPSEADWSIFVNEIEAVAEQMPTEVAEVPAWKAKCKNVAALGREMSITAAHISQLQYDIWVQGMLREIAQSQADKLAAIQPVDLTNYLEMVTQMDMRTSRMLLGLINILRIQNAALMYEYLLTPTQLTAWPLAMDTVGTLLIQQESSALIGLAQLGPPSDYTSTHVVKDIPVSLLLDGDDWEFEIPVQDGTTFPSSWSRVRIRHLEMHFVQAGGDEQPQIIHQPATQTGSVYILLQGSTIFHDRRRDEVMTFEAAVPLNYHYGYRLDTGETTVTNVPSEHFANTFMQMTPFTRWRLRLSASAAENAGLAFPTATAPDSTTQIVITFHVLAIRQIDWRHDE

SEQ ID NO: 982 - protein, 849 aa, Dryopteris marginalis
MAVMDYSEIYRDLNQISMGVDRVEFSEVMVIHRMYVRLADLDVGELAGAESVKRVYVFADVVELAPGTRMQMPGSVTVIILCRLLQFPTDGSQAATLQLPFMKLHALLRERHTSEITAADGMNWGTYIHGEEVQVIIPWSTVNSILRVWADGSSMTSSFHNVFDEPGRIVSTTVFTRPGAPDNTTLSADPGMSILNSFLLHTVSPSAFSVLARQSSNISFTNIPVDVVTDPNILLGIQTNVLIAELVQVCHPSPEIFAAVAEHLNWLNKIMLQVVKNETQLQGTESYNECLALLGRIQSVIKIARLGLVVPQLQYRMYSSLINQMAQVAQNYDREFKQFKLFIIQNQILGSYLLQQNRVFADREQQMESFHSVVISQRKEELDSATTKIERLSLQMEAENDAMEQAKKEMDEGLRKYQNEQVARAVFSVLSAIAQIGLAFITGGATAPGAVASAAQAVSIAGQAARALEKVVKILEQLEAVMEVVTAVKELVDSLEQIGHIVEAPVMPEMPSEADWSIFVNEIEAVAEQMPTEVAEVPAWKAKCKNVAALGREMSITAAHISQLQYDIWVQGMLREIAQSQADKLAAIQPVDLTNYLEMVTQMDMRTSRMLLGLINILRIQNAALMYEYLLTPTQLTAWPLAMDTVGTLLIQQESSALIGLAQLGPPSDYTSTHVVKDIPVSLLLDGDDWEFEIPVQDGTTFPSSWSRVRIRHLEMHFVQAGGDEQPQIIHQPATQTGSVYILLQGSTIFHDRRRDEVMTFEAAVPLNYHYGYRLDTGETTVTNVPSEHFANTFMQMTPFTRWRLRLSASAAENAGLAFPTATAPDSTTQIVITFHVLAIRQIDWRHDE

SEQ ID NO: 983 - protein, 849 aa, Dryopteris intermedia
MAVMDYSEIYRHLNQISMDVDRVEFSEVMVIHRMYVRLADLDVGELVGAESVKRVYVFADVVELAPGTRMQMPGSVTVIILCRLLQFPTDGSQAATLQLPFMKLHALLRERFTSEITAADGMNWGTYIHGDEVQVIIPWSTVNSILRVWADSSSMTSSFHNVFDEPGRIVSTTSFTRPGAPDNTTLSAHPGMSVLNSFLLYTVSPSAFSVLDRQSSNISFTNIPVDVMTDPNILLGIQTNVLIAELVQVCHPSPEIFAAVAEHLNWLNKIMLQVVKNETQLQGTESYNECLALLGRIQSVIKIARLGLVVPQLQYRMYSSLINQMAQIAQNYDRDFRQFKLFIIQNQILGSYLLQQNRVFADREQQMESFHSVVISQRKEELDNATTKIERLSLQMEAENGAMEQAKKEMDEGLRKYQNEQVARAVFSVLSAIAQIGLAFITGGATAPGAVASAAQAVSIAGQAARALEKVVKILEQLEAVMEVVTAVKELVDSLEQIGHIVEAPVMPEMPSEADWSIFVNEIEAVAEQMPTEVAEVPAWKAKCKNVAALGREMSITAAYISQLQYDIWVQGMLREIAQSQADKLAAIQPVDLTNYLEMVTQMDMRTSRMLLGLVNILRIQNAALMYEYLLTPTQLTAWPLSMDTVGTLLIQQESSALIGLAQLGPPSDYTSTHVVKDIPVSLLLDGGDWEFEIPVQDGTTFPSSWSRVRIRHLEMHFVQASGDEQQQIIHQPATQTGSVYILLQGSTIFHDRRRDEVMTFEAAVPLNYHYGYRLDTGETTVTNVPSEHFANTFMQMTPFTRWRLRLSASAAENAGLAFPTATAPDSTTQIVITFHVSAIRQIDWRHDE

SEQ ID NO: 984 - protein, 849 aa, Dryopteris intermedia
MAVMDYSELYRDLNQISMGVDRVEFSEVMVIHRMYVRLADLDVGELVGAERVKRVYVFADVVELAPGPKMQMPGSVTVIILCRLLQFPTNRSQAATLQLPFMKLRAFLREENRSEITAADGMNWGTYIHGEEVQVFIPSSTVNSILTVWADGSIITSSFHNVFDEPGRIVSTTVFTSPGAPDNTTMRAEPGMSSLNWFLLRTVSPSAFSVLARQSSNISFTNIPVDVVTDPNILLGIQTNVLIAELVQVCHPSPDIFAAVAEHLNWLNKILLQVVKNETQLQGTESYNECLALLGRIQSVMKIVRPGLVVPQLQYRMYSSLINQMAQVAQNYDRDFKQFKLFIIQNQILGSYLLQQNRVFADREQQMESFHSVVISQRKEELDSTTTKIERLSLQMEAENGAMEQAKKEMDEGLRKYQNEQVARAVFAVLSAVAQIGLAFITGGATAPGAVASAGQAVSIAGQAAQALEKVVKILERLEAVMEVVTAVKELVDSLEQIGLIVEAPVMPEMPSEADWSIFVNEIEAVAEQMPTEVAEVPAWKAKCKNVAALGREMSITAAYISQLQYDIWVQGMLREIAQSQADKLAAIQPVDLTNYLEMATQMDMRTSRMLLGLINMLRIQNAALMYEYLLTPTQLTAWPVTMDTVGTLLIQQENSALIGLAQLGPPSDYTSTHVVKDIPVSLLLDGADWEFEIPVQDGTTFPSSWSRVRIRHLEMHFVQASGDEQQQIIHQPATQTGSVYILLQGSTIFHDRRRDEVMTFEAAVPLNYHYGYRLDTGETTVTNVPSEHFANTFMQMTPFTRWRLRLSASAPENAGLAFPTATALDSTTQIVITFHVSAIRQIDWRHDE

SEQ ID NO: 985 - protein, 849 aa, Dryopteris intermedia
MAVMDYSELYRDLNQISMGVDRVEFSEVMVIHRMYVRLADLDVGELVGAERVKRVYVFADVVELAPGPKMQMPGSVTVIILCRLLQFPTNRSQAATLQLPFMKLRAFLREENRSEITAADGMNWGTYIHGEEVQVFIPSSTVNSILTVWADGSIITSSFHNVFDEPGRIVSTTVFTSPGAPDNTTMRAEPGMSSLNWFLLRTVSPSAFSVLARQSSNISFTNIPVDVVTDPNILLGIQTNVLIAELVQVCHPSPDIFAAVAEHLNWLNKILLQVVKNETQLQGTESYNECLALLGRIQSVIKIARLGLVVPQLQYRMYSSLINQMAQIAQNYDRDFRQFKLFIIQNQILGSYLLQQNRVFADREQQMESFHSVVISQRKEELDNATTKIERLSLQMEAENGAMEQAKKEMDEGLRKYQNEQVARAVFSVLSAIAQIGLAFITGGATAPGAVASAAQAVSIAGQAARALEKVVKILEQLEAVMEVVTAVKELVDSLEQIGHIVEAPVMPEMPSEADWSIFVNEIEAVAEQMPTEVAEVPAWKAKCKNVAALGREMSITAAYISQLQYDIWVQGMLREIAQSQADKLAAIQPVDLTNYLEMVTQMDMRTSRMLLGLVNILRIQNAALMYEYLLTPTQLTAWPLSMDTVGTLLIQQESSALIGLAQLGPPSDYTSTHVVKDIPVSLLLDGADWEFEIPVQDGTTFPSSWSRVRIRHLEMHFVQASGDEQQQIIHQPATQTGSVYILLQGSTIFHDRRRDEVMTFEAAVPLNYHYGYRLDTGETTVTNVPSEHFANTFMQMTPFTRWRLRLSASAAENAGLAFPTATAPDSTTQIVITFHVSAIRQIDWRHDE

SEQ ID NO: 986 - protein, 849 aa, Dryopteris intermedia
MAVMDYSEIYRHLNQISMDVDRVEFSEVMVIHRMYVRLADLDVGELVGAESVKRVYVFADVVELAPGTRMQMPGSVTVIILCRLLQFPTDGSQAATLQLPFMKLHALLRERFTSEITAADGMNWGTYIHGDEVQVIIPWSTVNSILRVWADSSSMTSSFHNVFDEPGRIVSTTSFTRPGSPDNTTLSAHPGMSVLNSFLLYTVSPSAFSVLDRQSSNISFTNIPVDVMTDPNILLGIQTNVLIAELVQVCHPSPEIFAAVAEHLNWLNKIMLQVVKNETQLQGTESYNECLALLGRIQSVIKIARLGLVVPQLQYRMYSSLINQMAQIAQNYDRDFRQFKLFIIQNQILGSYLLQQNRVFADREQQMESFHSVVISQRKEELDNATTKIERLSLQMEAENGAMEQAKKEMDEGLRKYQNEQVARAVFSVLSAIAQIGLAFITGGATAPGAVASAAQAVSIAGQAARALEKVVKILEQLEAVMEVVTAVKELVDSLEQIGHIVEAPVMPEMPSEADWSIFVNEIEAVAEQMPTEVAEVPAWKAKCKNVAALGREMSITAAYISQLQYDIWVQGMLREIAQSQADKLAAIQPVDLTNYLEMVTQMDMRTSRMLLGLVNILRIQNAALMYEYLLTPTQLTAWPLSMDTVGTLLIQQESSALIGLAQLGPPSDYTSTHVVKDIPVSLLLDGGDWEFEIPVQDGTTFPSSWSRVRIRHLEMHFVQASGDEQQQIIHQPATQTGSVYILLQGSTIFHDRRRDEVMTFEAAVPLNYHYGYRLDTGETTVTNVPSEHFANTFMQMTPFTRWRLRLSASAAENAGLAFPTATAPDSTTQIVITFHVSAIRQIDWRHDE

SEQ ID NO: 987 - protein, 810 aa, Deparia acrostichoides
MADIDYSVLYKDVNQISIRLEKMDFSEVMAVHRMFVRMDDLDVSSGTGLLVGAEKVKRLYVFADVVELPSKQVRLPGSDMIVILCRIFVRNGRHNMELFLPSMNMSMVAAGNGSIRGANLTTTMLSSSSNALQFKLQSGSMTSAVRLKDVDVAAALTCDVQAASASMPLTVMTTGTSPGNIWVLGMTTAIVVPESAVAVITDANILLGMQVTVLIAELVKTAHNSDVVIAAITRHVEWLNHLLVQAHAAAPNEDIVALLYRTQAFIKLQREGLVVPRLQYRMYKNLIDRMVQVAQNYDQDFKQLKLYLEQNKILGSYLLEQNKAFAAKEKDMDAFHSQIIALRTTELNNTIERMDALSKQMDEENAAMEQAKKDMDAGLVEYQNKQVANALFAVLGAIASIGLAFATGGATAPGAVAAAGAAVTAAGKAAEGLKKVLEILEGLQVVMEVVAAIKELVESLQGIGQLVDAPEMPDLPSNADWEIFVNEVEAVAEQMPTEVTQVPAWKAKCKNVAALGREMSTMAAHIAELQYQIQVQEMLREIAQKQADRLSSITPADLTNYLEMVSQMDMRTTRMLLELIRVLYIQNAALQYEYLQTPAPLSAWPVDMQTVWALLVQQETTAITGLLELGAPSDFTQEYVVKDIPVRLLLEGQDWEFELPVMNADFPSTWSRVRIHHVDMQFDAAGTPDVHVPTTKSGEVYMLLQSSRFFDDRAKRENEFISYQAGTGLFYQYAYRLATGEATVTNIPTEEYANTFMRLAPFTRWRLRLSSSAVENQGIAFPTATSADDTTQIKITFYVSAIRRISTRTI

SEQ ID NO: 988 - protein, 810 aa, Deparia acrostichoides
MADIDYSVLYKDVNQISIRLEKMDFSEVMAVHRMFVRMDDLDVSSGTGLLVGAEKVKRLYVFADVVELPSKQVRLPGSDMIVILCRIFVRNGRHNMELFLPSMNMSMVAAGNGSIRGANLTTTMLSSSSNALQFKLQSGSMTSAVRLKDVDVAAALTCDVQAASASMPLTVMTTGTSPGNIWVLGMTTAIVVPESAVAVITDANILLGMQVTVLIAELVKTAHNSDVVIAAITRHVEWLNHLLVQAHAAAPNEDIVALLYRTQAFIKLQREGLVVPRLQYRMYKNLIDRMVQVAQNYDQDFKQLKLYLEQNKILGSYLLEQNKAFAAKEKDMDAFHSQIIALRTTELNNTIERMDALSKQMDEENAAMEQAKKDMDAGLVEYQNKQVANALFAVLGAIASIGLAFATGGATAPGAVAAAGAAVTAAGKAAEGLKKVLEILEGLQVVMEVVAAIKELVESLQGIGQLVDAPEMPDLPSNADWEIFVNEVEAVAEQMPTEVTQVPAWKAKCKNVAALGREMSTMAAHIAELQYQIQVQEMLREIAQKQADRLSSITPADLTNYLEMVSQMDMRTTRMLLELIRVLYIQNAALQYEYLQTPAPLSAWPVDMQTVWALLVQQETTAITGLLELGAPSDFTQEYVVKDIPVRLLLEGQDWEFELPVINADFPSTWSRVRIHHVDMQFDAAGTPDVHVPTTKSGEVYMLLQSSRFFDDRAKRENEFISYQAGTGLFYQYAYRLATGEATVTNIPTEEYANTFMRLAPFTRWRLRLSSSAVENQGIAFPTATSADDTTQIKITFYVSAIRRISTRTI

SEQ ID NO: 989 - protein, 866 aa, Arachnoides simplicolor variegata
MEYSNLYRDVNTLSLSLQRTELSEVMVVHRMHVKLDELHVQTPAGSERVQRLYVVADVVELPFGSVSLPCKASLVILCRVLYMPHSGLPLSPICHLYLPNMSVRVVYGPSGMEVYPMATDGSAVAVYIHADRVIWRQDDWAVVRLMSLQITGPESTFSAPHLPEPVQAFTALTNVIMDIGQRIPASASDLQRSDEIELLTRFGLGDQLRVDFPGSSWSIAMVNPSATFNIFPIPHAQPVIREVLTDPHVIIGLQMNMLTAELVQAAHNAPLLINAVTRHVEWLNKILVEALPVASDSEDLLALLFRTETYLKMAAESRPVVPRLQYHMYRNLIHSMVQVAQAYDNEFQRLKLFIAQNEILGSYLLEQNRALARREEEMSSYHSQVVSLRRTELNNCLERMDQLSVQMENENKAMEEAKDEMDKALEAHERRELARALFAVLGAIATVALTFATGGAAAPLAVAAAGQAVTAAGALARGLQRVVEILEGLQALMDLVVIIRELVENLQSIGQLIDAPEMQEMPSNADWLIFVNEVEAVAEQMPAEVVGSVAVWKAKCRNVAVLGQEMCTMAAHIAELQQQIKLEELLQEIAKRQADRLLGISAADLSSFTEMLTQIEMRTTRLLVQLIKLLHIQNVAINYEYLFPAKGQLSSWPVTMHTVWQMLLQQESSAIMGLLTLGTSTDFARTYVVQDIPVGLLVDGFDWQFAIPVMDDSLAFPIGFSRVRIRHVELKFSATDSDGSVIVHQPQTDNGFIYILLQSAQSFSDRRERQAMDYEASMGLAYPYAYNLTTGVPTLTNIPSEQYANTFMQMTPFTGWRLRLSSSAQENRGLTFPTAASPDDSTQISITFHITAIRAIDVRSMGDEGQ

SEQ ID NO: 990 - protein, 866 aa, Arachnoides simplicolor variegata
MEYSNLYRDVNTLSLSLQRTELSEVMVVHRMHVKLDELHVQTPAGSERVQRLYVVADVVELPFGSVSLPCKASLVILCRVLYMPHSGLPLSPICHLYLPNMSVRVVYGPSGMEVYPMATDGSAVAVYIHADRVIWRQDDWAVVRLMSLQITGPESTFSAPHLPEPVQAFTALTNVIMDIGQRIPASASDLQRSDEIELLTRFGLGDQLRVDFPGSSWSIAMVNPSATFNIFPIPHAQPVIREVLTDPHVIIGLQMNMLTAELVQAAHNAPLLINAVTRHVEWLNKILVEALPVASDSEDLLALLFRTETYLKMAAESRPVVPRLQYHMYRNLIHSMVQVAQAYDNEFQRLKLFIAQNEILGSYLLEQNRALARREEEMSSYHSQVVSLRRTELNNCLERMDQLSVQMENENKAMEEAKDEMDKALEAHERRELARALFAVLGAIATVALTFATGGAAAPLAVAAAGQAVTAAGALARGLQRVVEILEGLQALMDLVVIIRELVENLQSIGQLIDAPEMQEMPSNADWLIFVNEVEAVAEQMPAEVVGSVAVWKAKCRNVAVLGQEMCTMAAHIAELQQQIKLEELLQEIAKRQADRLLGISAADLSSFTEMLTQIDMRTTRLLVQLIKLLHIQNVAINYEYLFPAKGQLSSWPVTMHTVWQMLLQQESSAIMGLLTLGTSTDFARTYVVQDIPVGLLVDGFDWQFAIPVMDDSLAFPIGFSRVRIRHVELKFSATDSDGSVIVHQPQTDNGFIYILLQSAQSFSDRRERQAMDYEASMGLAYPYAYNLTTGVPTLTNIPSEQYANTFMQMTPFTGWRLRLSSSAQENRGLTFPTAASPDDSTQISITFHITAIRAIDVRSMGDEGQ

SEQ ID NO: 991 - protein, 697 aa, Arachnoides simplicolor variegata
MEYSNLYRDVNTLSLSLQRTELSEVMVVHRMHVKLDELHVQTPAGSERVQRLYVVADVVELPFGSVSLPCKASLVILCRVLYMPHSGLPLSPICHLYLPNMSVRVVYGPSGMEVYPMATDGSAVAVYIHADRVIWRQDDWAVVRLMSLQITGPESTFSAPHLPEPVQAFTALTNVIMDIGQRIPASASDLQRSDEIELLTRFGLGDQLRVDFPGSSWSIAMVNPSATFNIFPIPHAQPVIREVLTDPHVIIGLQMNMLTAELVQAAHNAPLLINAVTRHVEWLNKILVEALPVASDSEDLLALLFRTETYLKMAAESRPVVPRLQYHMYRNLIHSMVQVAQAYDNEFQRLKLFIAQNEILGSYLLEQNRALARREEEMSSYHSQVVSLRRTELNNCLERMDQLSVQMENENKAMEEAKDEMDKALEAHERRELARALFAVLGAIATVALTFATGGAAAPLAVAAAGQAVTAAGALARGLQRVVEILEGLQALMDLVVIIRELVENLQSIGQLIDAPEMQEMPSNADWLIFVNEVEAVAEQMPAEVVGSVAVWKAKCRNVAVLGQEMCTMAAHIAELQQQIKLEELLQEIAKRQADRLLGISAADLSSFTEMLTQIDMRTTRLLVQLIKLLHIQNVAINYEYLFPAKGQLSSWPVTMHTVWQMLLQQESSAIMGLLTLGPSTDFARTCCPRHTSRITG

SEQ ID NO: 992 - protein, 866 aa, Arachnoides simplicolor variegata
MEYSNLYRDVNTLSLSLQRTELSEVMVVHRMHVKLDELHVQTPAGSERVQRLYVVADVVELPFGSVSLPCKASLVILCRVLYMPHSGLPLSPICHLYLPNMSVRVVYGPSGMEVYPMATDGSAVAVYIHADRVIWRQDDWAVVRLMSLQITGPESTFSAPHLPEPVQAFTALTNVIMDIGQRIPASASDLQRSDEIELLTRFGLGDQLRVDFPGSSWSIAMVNPSATFNIFPIPHAQPVIREVLTDPHVIIGLQMNMLTAELVQAAHNAPLLINAVTRHVEWLNKILVEALPVASDSEDLLALLFRTETYLKMAAESRPVVPRLQYHMYRNLIHSMVQVAQAYDNEFQRLKLFIAQNEILGSYLLEQNRALARREEEMSSYHSQVVSLRRTELNNCLERMDQLSVQMENENKAMEEAKDEMDKALEAHERRELARALFAVLGAIATVALTFATGGAAAPLAVAAAGQAVTAAGALARGLQRVVEILEGLQALMDLVVIIRELVENLQSIGQLIDAPEMQEMPSNADWLIFVNEVEAVAEQMPAEVVGSVAVWKAKCRNVAVLGQEMCTMAAHIAELQQQIKLEELLQEIAKRQADRLLGISAADLSSFTEMLTQIDMRTTRLLVQLIKLLHIQNVAINYEYLFPAKGQLSSWPVTMHTVWQMLLQQESSAIMGLLTLGPSTDFARTYVVQDIPVGLLVDGFDWQFAIPVMDDSLAFPIGFSRVRIRHVELKFSATDSDGSVIVHQPQTDNGFIYILLQSAQSFSDRRERQAMDYEASMGLAYPYAYNLTTGVPTLTNIPSEQYANTFMQMTPFTGWRLRLSSSAQENRGLTFPTAASPDDSTQISITFHITAIRAIDVRSMGDEGQ

SEQ ID NO: 993 - protein, 859 aa, Osmunda regalis
MWCGSCEDPQPPSPIQPEDISMASVDYGQIYQNVNQITRPVATKECSEVMAIHRMYLQLDNLDVELLTKANTVKQLVVFVDVVEIESDNVKLPGSSQVTIVCRILHVKKNNVALNFDFLGPTKCNGRSTRGYARIMDDSPVFELSIYAQQLVGDDGAMLRVRHPVTVATIENGHDYEVREGNMEWQIWPYSSTGLSSAARSHELKTIGDHGRERTWLIIEQEWSRFIAVVPDLIPLRWLTDSNVLLGMEATLLTAELILSYQTDAQATVAAALQHVEWLNTQLLQVVEETDLEATGERLLSLLFRAQSLLKLPVDGSHTLIVPRLEYGLYRDLINRMTDVAEKYNSEFMQMNLFIQQNEILGTYLLEQNKVFAQKEKDMEVFHSSLVTLKQQELTSAKSKMAQLETQLTEQKAAMDQAKKEMDEGLRRYNDAQVANAFFAVILGVASIGLAILTGGATAGAAVAGAAQAVSAVSAVANTLGRVVDILEGLQKVMEVLEAINDLTTSLAAINEMVEAPQMPDMPSEADWAIFENEIEAVAESMPTEVSEVPTWKAKCKNVAAVCREITTTATYIGQLQYDLLVQSMQQQIAMRQAERLEAIQPADLTNYLEMATELDMRTSRMLLGLLKVLTLQNGALLYHFLLPPKPFTGWVSMDIVRNALVQHDIEAVIARTELGPSTDFTRTYVVEGIPVTLLLEGDDWNFTIPVHDSAFPSNWSRVRIRYLEMRFSSSEEVHQPTTNTGEVYILLQAARMFDDRLKGDVLHYQAAVPLQYQYAYDLNTGETTQSNLPSEEHTGEYMRMTPFTRWRLRLSASAYENQGLAFPTATALDSTTQISITFFLTAIRQIDTRFTELMDEPQ

SEQ ID NO: 994 - protein, 948 aa, Nephrolepis biserata
MLTHLIFPLCVQGGNVACKERYTLLPYNFLCLHRQDSMASSASVGVADWRELYRDLNQVSDRMRFDQLEFSELMVIHRMHIKVSELNMGHLEGSEKVKRFYVFADVVEYDLVKSDGEVAHLPGSISVVFICREWHVHSPINARRDRDPPMYVFSDWVLRLRLPHMRWHLNEPREDMHRIDPETMQEFSEPSFCVYADDVSVAYYNYQDGESSWDPALGFPLPQLLALCPVVFYDNLSAPIPDHLLVTRMQMSTTTVTRSSTRVRFTMRYEDNQDVVKDIATMPQGTRVIFKREGRLSDFVVGGSEGSITSLDDGADGSRLMPAWSLLRQDSKFPIELLTDPNILPAMQTSMLIGELVEVGNPSVAITEVVHKHVKWLNKLLLQVIEEKNGKDVEDYIELSFRAQYVIKEVGRIRGLVVPQLQYDVYSNLINRMAQVAESYDQALRQFRLSIQNTKISGGFLLEQNRAFADKEKDMDVLYSEIITQRQIELDNTLQKLERLSLQMETQQADMEQAQADMEAGLRQFQNRQAARALFAVLGAIAAVALTVVTGGAAAPLAVGAAGTAVTVAGSVVAGLKRVVDVLKRLQAVMEVVALIKELFDTLQDLNQAVELPDMPDMPLQSDWLIFVNEVEAVAEGMPTEVSEVVAWKTKCKNVAVLGQEMMTSAAYISQLQYDIMVQNMLQQIARKQADRLSAIQLPDLKNFTEMVVQMDMRTTRLLVALIKVVYIQNAALMYQYLSAPTPVSAWPVNMDTVWRMLVQHEQLAIQGLVRLGPAFDIVRTYVVKGIPVSLLLDGDDYEFEIPAEDPLTFPLPLSRVRIHHLEMKFVQGVAQVHIPTTATGAIYILLQGSRNFHDRNEGEIMHFEAATALDYHYAYHLETGETNVTNLPSAEFLRTFMRMTPFSNWRLRLSASAEENQGLAFPTATSADATTQIAITFHISAIRRVSL

SEQ ID NO: 995 - protein, 1079 aa, Gymnocarpium dryopteris
MGENVEDNEYHYDYEAAYKEIDEHFRTVVKRECSEEMMVVHRMYLRLDDIDAGHLPNPEGVKIMLVYADVVDVESERLEFAGRFEVYIMCRLLRVKARHGSTLDFKYFTPVGACMSILQLPAWTMDEQLHIWAQQLMGGESEQELAIRAEFWAYEETTRVQVVGEWQVKPYGRECTKDESVVRTCQTLQKPGFTYRPDESDFQEAQSEVEDLLCTGPRWFKECFHLVSPEPISVNWSDELCETIEGAFSSLELALSRTCVIPSAAFLHLQWLTRHLAQMRSTTSVSSTTSAIINRLELLLSHAKTLLNNVTYLKLHTRIIGEVVYAEVYKNVRRAFSTRECSELMTMQRMYFLLDDLDAGLFKNPQVVKELIVYADIVEIGSTTLRILGSTRVVIMCRLLSLKGSQEFSPFILNFPHISHDHTSSCLSLYVSPAMLLNQLPTSGVYIYAQELIISNPLNPTTCFSTSFQSSIPVEILGDSNVLPLIQAALHSLTYQLSATANVKTAQDHLQWLITHLAQVRLCHGMQEENKTNLHESSLNDLRDLLLHAQLLLKMSNESESVIVPSLRYEKYSKLIERMATAASDYNSQFLQVDYFIRQNQITGDYLLQQNKIFIEKERDVEYFHSLLTECKKTELDAAISKMKNLKEQLTTQEAEMNQAKKDMHTGLIANAVFTLFEAVFELGLAASTLANAATTLRRFKEVVDKAKKAKDTLEEIVKMVKMVENICSYFDALMDVYTLDIEKLQQGLVMPEMPSKADWEIFENELTAVAENMPLEISQVPIWKAKCKNVASVFRELITTASYMKQLEYDILVEDMEAKIAAKQAERLDMTLADLKNYEEMAMQLEMRTTRILSHLLKALKVQSGALLYHYLLPPRSITNWMDMDAVTNALLSYEELAVEGLEQLGTPTDYRREYVVPDIPIALLMNGQDWIFTIPIDDYLVFPAHWSTVRIKYVEMRFNEGHYLPSTSSGQVYFLLQASRMFQDRKKGEVLNYEAAIPLDYQFAYELETGHPTVTNKPTYEYKGTFMRMTPFTQWRLRLSASAHENQGLSFPTAREANSTTQISITFYLTAIREKSI

SEQ ID NO: 996 - protein, 862 aa, Astrolepis sinuata Jo Levy
MAVPDYYRIYKNVNQVTRAVASTQCSEVMSIHRMYFKLDMLEVELLTDARTVKQLVVFADVVEIEKDKVQLPASSKVTVVCRILLVKKENVALEFTLLAPVACESGIIEGSVARIRSSSPAGVGLSIYAQQVVCSTASALLQVEHPVTVQRGYPESCSHPLQVIPGNIHWRIRITSSHDGNLSTAERSQEIRAPMHGGITWSVMPTEWSSFISLLQPVLIPLDSMADPNVILGMQSSLLIAELVLSYQTHEPDTVSAALQHVQWLGTNLLQVVADQNSGQQLLDRPDQTTQELLTLLARSQSLLKMPLDGSQTLIVPRLEYGQYRNLISSMATVAEAYNSEFKQVDLFIQQNQILGSYLLQQNKAFAQREKDMEAFYGLVVARKHEELRAAQDRMNELNAQLTQQREAMDEAKEKMDKGLQKYKDEQVAKAFFAVLKGVLEVGLAIFTGGATAGAAVKGASEAVIAVSDLAGMLQTVLNIMEGMEKVMEVLNAMKDLTTSLSEINQMVEAPKMPLMPSKMEWDIFENEMEEVAESMPTEVIEARTWKTKCRNVAAVCREICTTAAYIGQLEYDLFVNSSQEEIAKKHAERLEVIQPADLKNYLEMATQLDMRTSRMLLGLLKVLTLQNGALLFHYLLPPKPFTGWVTMDMVRNALVQHEADALAARERLGPSTDFTQTYVVSDIPLSLLLDGDDWIFTIPTDDPTFPLSWSRVRIRYLEMKFSGGEDYHKPTTNSGQVYILLQAARIFQDRLFNEVLHYEAAMPLRYQYAYDLKSGETTLSNRPSQQHDGEFMQMTPFCQWRLRLSASAIENLGLAFPTAECASGDLTYQRPFTQISIIFYLTAIRRIDTRHERSRDGFVES

SEQ ID NO: 997 - protein, 838 aa, Pyrrosia lingua
MGNAMTGPSYEEIYKNANYIHRSVATPVCSEVMSVSRMHMAVSELDVKRLKNPEIVKELYVFADVLFWDDGSTIWPGAEVVFVMSRVTVLDMAILASTGAAEAAANVTASIRVPWLNVPSTTFNISHQDQIVSPFSCSIRPKHSTTRAGTAPAGFFLHTQQLMDTSHATKPAISDFVLKLETREGSFAHDEGVDESIREIFNDARLFWADVNLTLLWAMEATVLVAELILTYMSSSTRTVKEATLHLKWMNQLLIHALETKDGEPDAAVERLFNTLALQVPLILNNPSLVAGLVVPRLQYSTYRNLITTMAHLADGYTREFQQLVMFMDQNEVLGTFLLEQNQAFAAKERDMESFHAELHKVKTNDLIQALATLEQLEVLMTEMNAEMEQAQQDMEEGLRRFRNRQVARAVFSVFGSIVAIASAFFTGGATAGAAVSSTKNAVNQVVEMRSSLERIVETLEKLLLVSDFLVAMKELINAVQNIHDAAANVPALPDMPTDAEWTIFENEIEAVAAEMPEEVSEVLVWKTKCKNMAAIGREMVTMATVISQLQYDVRMHELLQEISRNQAERLEAIRPVDVRNYQEMATQLEMRTTQILLGLLEVLSLQNAAIQYQYLMPPSPVIMTNTIITMSDVWTELLQQEAAAIVALSELGFPTDRKVTYTVKGIPVGVLLDGQDWDFSISTEDGDHFPYGWSRVRISYVELKFGSASLGSTAQAENEEIHEPVTDTGEVYMVLRGEQTFVDRKRGEKVRYEAVAPVKYQYAYQLETGETTEQNRPTEEFTNHFMRMTPFTRWKLRIPGSARENRGLAFPKATAMDATTQITIHFYVTAIRAADWH

SEQ ID NO: 998 - protein, 838 aa, Pyrrosia lingua
MGNAMTGPSYEEIYKNANYIHRSVATPVCSEVMSVSRMHMAVSELDVKRLKNPEIVKELYVFADVLFWDDGSTIWPGAEVVFVMSRVTVLDMAILASTGAAEAAANVTASIRVPWLNVPSTTFNISHQDQIVSPFSCSIRPKHSTTRAGTAPAGFFLHTQQLMDTSHATKPAISDFVLKLETREGSFAHDEGVDESIREIFNDARLFWADVNLTLLWAMEATVLVAELILTYMSSSTRTVKEATLHLKWMNQLLIHALETKDGEPDAAVERLFNTLALQVPLILNNPSLVAGLVVPRLQYSTYRNLITTMAHLADGYTREFQQLVMFMDQNEVLGTFLLEQNQAFAAKERDMESFHAELHKVKTNDLIQALATLEQLEVLMTEMNAEMEQAQQDMEEGLRRFRNRQVARAVFSVFGSIVAIASAFFTGGATAGAAVSSTKNAVNQVVEMRSSLERIVETLEKLLLVSDFLVAMKELINAVQNIHDAAANVPALPDMPTDAEWTIFENEIEAVAAEMPEEVSEVLVWKTKCKNMAAIGREMVTMATVISQLQYDVRMHELLQEISRNQAERLEAIRPVDVRNYQEMATQLEMRTTQILLGLLEVLSLQNAAIQYQYLMPPSPVIMNNTIITMSDVWTELLQQEAAAIVALSELGFPTDRKVTYTVKGIPVSVLLDGQDWDFSISTEDGDHFPYGWSRVRISYVELKFGSASLGLTAQAENEEIHEPVTNTGEVYMVLRGEQTFVDRKRGEKVRYEAVAPIKYQYAYQLETGETTEQNRPTEEFTNHFMRMTPFTRWKLRIPGSARENRGLAFPKATAMDATTQITIHFYVTAIRAADWH

SEQ ID NO: 999 - protein, 838 aa, Pyrrosia lingua
MGNAMTGPSYEEIYKNANYIHRSVATPVCSEVMSVSRMHMAVSELDVKRLKNPEIVKELYVFADVLFWDDGSTIWPGAEVVFVMSRVTVLDMAILASTGAAEAAANVTASIRVPWLNVPSTTFNISHQDQIVSPFSCSIRPKHSTTRAGTAPAGFFLHTQQLMDTSHATKPAISDFVLKLETREGSFAHDEGVDESIREIFNDARLFWADVNLTLLWAMEATVLVAELILTYMSSSTRTVKEATLHLKWMNQLLIHALQTKDGEPDAAVERLFNTLALQVPLILNNPSLVAGLVVPRLQYSTYRNLITTMAHLADGYTREFQQLVMFMDQNEVLGTFLLEQNQAFAAKERDMESFHAELHKVKTNDLIQALATLEQLEVLMTEMNAEMEQAQQDMEEGLRRFRNRQVARAVFSVFGSIVAIASAFFTGGATAGAAVSSTKNAVNQVVEMRSSLERIVETLEKLLLVSDFLVAMKELINAVQNIHDAAANVPAFPDMPTDAEWTIFENEIEAVAAEMPEEVSEVLVWKTKCKNMAAIGREMVTMATVISQLQYDVRMHELLQEISRNQAERLEAIRPVDVRNYQEMATQLEMRTTQILLGLLEVLSLQNAAIQYQYLMPPSPVIMTNTIITMSDVWTELLQQEAAAIVALSELGFPTDRKVTYTVKGIPVGVLLDGQDWDFSISTEDGDHFPYGWSRVRISYVELKFGSASLGSTAQAENEEIHEPVTDTGEVYMVLRGEQTFVDRKRGEKVRYEAVAPVKYQYAYQLETGETTEQNRPTEEFTNHFMRMTPFTRWKLRIPGSARENRGLAFPKATAMDATTQITIHFYVTAIRAADWH

SEQ ID NO: 1000 - protein, 797 aa, Pyrrosia polydactyla
MIDYGAVYAHVNEVGRRLGTGKVKCTRVLAKQGMVVRLDELTMEELQDAGAVEQLVVFADVVEVSGTRVNFPGMFVTIVCRILVLLHDSLRLDLTLHSSWNTVTNNPARFSLFAQKIVSASAPARKSVVLQIRRPREDVSRVSTAASDQATAWGDIIFVVQTVPDAMRGRLETGVLASLGVLVDPNTIMGIQSTLLIAELILSYRTDLPETVQAAVEHAQWINSTLLAVEASLDSSAEEALELRNLLARAQMLLKFPTDGSQSLIVPRLEYRGYQSLIDRMVTVAESYNSELGQFMLFITQTQILQNELLARTKAFAAKERDVADLQSSIVSRKRTELLQAEQTMTRLNDILNQQAKDMEQAQNDMEQGLKEYKDREVARAFIGVLVAVVEIGVSFATGGLTALSGIRRSINAAKGLARLAEMIKAVIKVMEQLAEAMEVLNAVRALMDAVAVSKDIFEAPEMPDMPTIAEWDIFENEIELVAEGMPEEVSEARVWRVKCKNVAAVCREITRTGVYITQLQYELFVQAQQEAIATRHAERLEQIEAVNLDNYMEMATQIDMRTTRLLLGLLKMMSIQNAALQYHYLLPKEPFTGWPTIDIVRRRLIEKEIQAVHGLEALGMSTNFTRTFNVEDISVDLLLSGEDWNFTLSPESNSPFPLTFSRVRIRHVEMKFANTLAPRPSTTSGKLYILLQGSRTFQDRRTHQVLEYDAAVPIAYPYAYNLSTGETTLSNEPSQDDASNLLFFRMTPFTNWRLRLSSSAFENEGLLFPEGSTTTSMEITFHITAIRSIDTRLQVS

SEQ ID NO: 1001 - protein, 797 aa, Pyrrosia polydactyla
MIDYGAVYAHVNEVGRRLGTGKVKCTRVLAKQGMVVRLDELTMEELQDAGAVEQLVVFADVVEVSGTRVNFPGMFVTIVCRILVLLHDSLRLDLTLHSSWNTVTNNPARFSLFAQKVVSASAPARKSVVLQIRRPREDVSRVSTAASDQATAWGDIIFVVQTVPDAMRGRLETGVLASLGVLVDPNTIMGIQSTLLIAELILSYRTDLPETVQAAVEHAQWINSTLLAVEASLDSSAEEALELRNLLARAQMLLKFPTDGSQSLIVPRLEYRGYQSLIDRMVTVAESYNSELGQFMLFITQTQILQNELLARTKAFAAKERDVADLQSSIVSRKRTELLQAEQTMTRLNDILNQQAKDMEQAQNDMEQGLKEYKDREVARAFIGVLVAVVEIGVSFATGGLTALSGIRRSINAAKGLARLAEMIKAVIKVMEQLAEAMEVLNAVRALMDAVAVSKEIFEAPEMPDMPTIAEWDIFENEIELVAEGMPEEVSEARVWRVKCKNVAAVCREITRTGVYITQLQYELFVQAQQEAIATRHAERLEQIEAVNLDNYMEMATQIDMRTTRLLLGLLKMMSIQNAALQYHYLLPKEPFTGWPTIDIVRRRLIEKEIQAVHGLEALGMSTNFTRTFNVEDISVDLLLSGEDWNFTLSPESNSPFPLTFSRVRIRHVEMKFANTLAPRPSTTSGKLYILLQGSRTFQDRRTHQVLEYDAAVPIAYPYAYNLSSGETTLSNEPSQDDASNLLFFRMTPFTNWRLRLSSSAFENEGLLFPEGSTTTSMEITFHITAIRSIDTRLQVS

SEQ ID NO: 1002 - protein, 797 aa, Pyrrosia polydactyla
MIDYGAVYAHVNEVGRRLGTGKVKCTRVLAKQGMVVRLDELTMEELQDAGAVEQLVVFADVVEVSGTRVNFPGMFVTIVCRILVLLHDSLRLDLTLHSSWNTVTNNPARFSLFAQKIVSASAPARKSVVLQIRRPREDVSRVSTAASDQATAWGDIIFVVQTVPDAMRGRLETGVLASLGVLVDPNTIMGIQSTLLIAELILSYRTDLPETVQAAVEHAQWINSTLLAVEASLDSSAEEALELRNLLARAQMLLKFPTDGSQSLIVPRLEYRGYQSLIDRMVTVAESYNSELGQFMLFITQTQILQNELLARTKAFAAKERDVADLQSSIVSRKRTELLQAEQTMTRLNDILNQQAKDMEQAQNDMEHGLKEYKDREVARAFIGVLVAVVEIGVSFATGGLTALSGIRRSINAAKGLARLAEMIKAVIKVMEQLAEAMEVLNAVRALMDAVAVSKDIFEAPEMPDMPTIAEWDIFENEIELVAEGMPEEVSEARVWRVKCKNVAAVCREITRTGVYITQLQYELFVQAQQEAIATRHAERLEQIEAVNLDNYMEMATQIDMRTTRLLLGLLKMMSIQNAALQYHYLLPKEPFTGWPTIDIVRRRLIEKEIQAVHGLEALGMSTNFTRTFNVEDISVDLLLSGEDWNFTLSPESNSPFPLTFSRVRIRHVEMKFANTLAPRPSTTSGKLYILLQGSRTFQDRRTHQVLEYDAAVPIAYPYAYNLSTGETTLSNEPSQDDASNLLFFRMTPFTNWRLRLSSSAFENEGLLFPEGSTTTSMEITFHITAIRSIDTRLQVS

SEQ ID NO: 1003 - protein, 879 aa, Pyrrosia polydactyla
MEYSDLYADVNQVSLRFQSTEFSEVMVVHRMHVQLQDLDMTTGPSLLMFPGSEKVQRLYIVADVVELPSNATNMRLPATVSAVILCRVLYVQDVNSPFLTCGLHFPLMRMRLVETKEGLVKVFPVPASASSVDADIGLYIHADRVIYRQDTSNLDPLQPLQLRVIGGSTFSTDVRPGWTTNLEVFSLILWLTLSKGQRIPATESDLQRSDEFELLPPPTPDKLNVVFTYLAPGNISSMLVDVEAGATFNFFRVPPADPVPTEVLTSPYIILGLQMNMLIAELVLAAHNSPRVIGVVTKHVEWLNKILKPKLGLANDDISALLFRVQSFLKMANQPRSVVPRLQYHMYSNLINRMVQVAQAYDQEFRQLKLFIVQNQILGSYLLEQNKAFASKEKDMSAFHSQVVSLRRTELNNAIDRMDQLSAQMERENEAMDQAKEEMMQAIEDYQQQQVANALFAVLGAIAAVALAFATAGATAPGAVAAAGAAVTAAGRLAEGLQKVVEILEGLQKVMEIIGIIRDLVESLQNLGKLVDAPEMPDMPSDADWLIFVNEVEAVAEQMPADVVGSVAVWKAKCKNVAVLGQEMCTTAAHIGELTYQIKVEEMLQEIAERQANRLEGITPADLSSYTEMLSQIDMRTTRLLLQLIRVLHIQNAALKYEYLFTASGQLNSWPVSMDTVWSMLLQHENSALVGLLDLGPSTDFTRTVVLKDVPVGLLVSGSDWQVVIPVEDSVAFPIGFSRVRIRYVELKFEQGSNDDGTVIHQPRTNGGLIYLLLQSSRFFKDRKRREILDYEASMGLAYAFAYNLTTGVPTLTNVPSQEFANTFMRMTPFNNWRLRLSASAEENRGLVFPTATSPGDRTQIALTFHITAIRAIDTRADE

SEQ ID NO: 1004 - protein, 879 aa, Pyrrosia polydactyla
MEYSDLYADVNQVSLRFQSTEFSEVMVVHRMHVQLQDLDMTTGPSLLMFPGSEKVQRLYIVADVVELPSNATNMRLPATVSAVILCRVLYVQDVNSPFLTCGLHFPLMRMRLVETKEGLVKVFPVPASASSVDADIGLYIHADRVIYRQDTSNLDPLQPLQLRVIGGSTFSTDVRPGWTTNLEVFSLILWLTLSKGQRIPATESDLQRSDEFELLPPPTPDKLNVVFTYLAPGNISNMLVDVEAGATFNFFRVPPADPVPTEVLTSPYIILGLQMNMLIAELVLAAHNSPRVIGVVTKHVEWLNKILKPKLGLANDDISALLFRVQSFLKMANQPRSVVPRLQYHMYSNLINRMVQVAQAYDQEFRQLKLFIVQNQILGSYLLEQNKAFASKEKDMSAFHSQVVSLRRTELNNAIDRMDQLSAQMERENEAMDQAKEEMMQAIEDYQQQQVANALFAVLGAIAAVALAFATAGATAPGAVAAAGAAVTAAGRLAEGLQKVVEILEGLQKVMEIIGIIRDLVESLQNLGKLVDAPEMPDMPSDADWLIFVNEVEAVAEQMPADVVGSVAVWKAKCKNVAVLGQEMCTTAAHIGELTYQIKVEEMLQEIAERQANRLEGITPADLSSYTEMLSQIDMRTTRLLLQLIRVLHIQNAALKYEYLFTASGQLNSWPVSMDTVWSMLLQHENSALVGLLDLGPSTDFTRTVVLKDVPVGLLVSGSDWQVVIPVEDSVAFPIGFSRVRIRYVELKFEQGSNDDGTVIHQPRTNGGLIYLLLQSSRFFKDRKRREILDYEASMGLAYAFAYNLTTGVPTLTNVPSQEFANTFMRMTPFNNWRLRLSASAEENRGLVFPTATSPGDRTQIALTFHITAIRAIDTRADE

SEQ ID NO: 1005 - protein, 868 aa, Microsorum punctatum Elkhorn
MDYGTLYRDLNQISMPVAQVQFSEVLVIHRMYLRLSDLDVGELGGAEGVKRVYVFADVVDLAPEEAAPRHQTQMPGSVKVIIMCRLLRFPLDGATAATLRLRFLKMHATLKEFQVRSEITAADGVKWGTYIHADDVQYFPQSGAALNFSRLWVWADDSIITSAHHNVLNEPGRIVSSATFLWAHGQPNHAHVSAEPGWNFRNGFSLATVSPTASSVLARQCWNLPFTSIPVEVVVDPNILLGMQTTVHIVELVKICCPLPDVVSAVAEHTVWLNKVLLEVVQNESQLQGTESYNECLVLLGRVQSVMKIGRFEAVVPQLQYRLYGSLINQMAQTARTYDQEFKQFKLFIIQNQILGSYLLQQNKAFAERELQMESFHSAVISQRGQELDNAIAKMDRLSLQMEEENEAMEQAQKEMEEGLREFQNRQVARALFSVLTAVAMIGLAFVTAGATAPGAVASAGRAVSAAGQAAQGLRRVVEILEGLEAVMEVVAAVKELVNSLEQVGQMIDAPVMPDMPSEADWSIFVNEIEAVAEGMPTEVSEVPVWKAKCRNVAALGREMSITAAQISELQYDIWVQGLMRDMARSQADRLATIQPADLSSYLEMATQMDMRTTRMLLGLLNILRIQNAALMYEYLLTPTELTAWPLGMDTVANLLIAQENAALLGLTELGPSSNFTSRHVVKGIPVSLLLDGEDWEFEIPAQSGMSSFPFSWTRVRIRHLEMHFVQEASDGGEIIHQPATQTGTVYILLQGSTIFHDRRRNEVMTFQAAAPLNYHYAYRLDTGEATLTNEPSEQFANTFMQMTPFTRWRLRLSASAKENAGLAFPTATAPDSSTEIVITFHVTAIRQIDWRQEEVAAKDASDSIVSS

SEQ ID NO: 1006 - protein, 827 aa, Athyrium filix-femina frizelliae
MIHKVRIAAAVDYESIYKNANEIARVVGTDKISCSEVMACHRMFVRLDTLSVEQLVGSSNVKQLIVFADVVEIQDSSFTLPGSTQIFIACRILDVKANKDIDLTLDWQVVNNAGQTSIPRCAIYAQNIVSSSSTKSGTILLKVKYQRNSSSAPVYFGREFSYSAASTAVVDFSTAQDNLELINRKNWVVNINGMEWSAYVDLQFGLPSVEELAEYNILTGLQSTILISEMILNYRTDLPDTVTAAIAHVQWANLCLLPVVGMTNLEGAYQLPSLLGRAQSLLKLPTDGSQSLIVPRLEYSGYEKLIAQMVTVVESYNNEFVQLILFIQQNQIMGAYLLEQNKAFAAKEKDIAELESMILDRKKQEMDNAFQKMEALNKQLEQQVEEMNQAKEDMDAGIQKYKDEQVAKAFFAVIKGILGVALAIATGGATSAGAVAGAVDAVGKVSQLAKALQKVVDILQGLEELAAILSAIKLLLESLEDLNKMVEAPEMPEMPTMADWDIFENEIEAVAEQMPEEVAEVPVWKAKCKNVAAVCREISTTAAYIGQLEYDLFLHGKQQEIAEAQAKRLESITPANLTNYLEMATQLDMRTTRLLVGLLKMLTVQNGALQYHYLLPPKPFTGWPTMDRIRSTLVQNEHNAVLALEQLGFSTDFTKTYVLSDVPVHLLLSGEDWIFNIPVDDPTFPSNWSRVRIVYLEINFTGDEGSTHFPSTNTGEVYFLLQASRMFQDRLEGEYLKYEAATPLQYQYAYVLQTGETTVPNKPSQEEDGRFLRMTPFTSWRLRLSASADENKGLSFPSANALDSTTQISITFYLTAIRKINTREGIE

SEQ ID NO: 1007 - protein, 893 aa, Coniogramme venusta Ping Wu
MAAAAERRLPDYRELYKDLNQISERVRFDQMEFSEVMVIHRMFIRMEELDLGHLEGAEKVKRLYVFADVVEVAEGVSWGLWRNGPLARLPGSIAIVIVCRVLWVSGVLASLGNNSMMLQLPHMKLRVLEITPSKLEIHRVDTSTEAADYPALCIHASVLECSNIRLANDRDRPPFPVRLFGFRPELRDPNLVFSSVPRSVVDHHPIYEFYVFSVIRDVFPRLPLPESVSVQLDSATRGANWYSLQTGSISQVGSVSLNRFPAEEEELEPAFSLMKTKIPAAILTDPNILLTIQTSLLIAELVEVTHPSAETVAAVAKHAEWVNELLLQATSEAAGTSSHEEYLALLFRSQYLIKVRGRTRSLVVPQLQYDVYSNLINRMAQVAESFDQSLRQVKLFILQNKILGSYLLEQNRALAEKEKDMDVFHSELISQSKLELENTIQKMEQLSLQMETQREGMDQAKEDMDAGLRSFQNRRVAEAMFAVISATAAIGLAFVTGGATAPAAVTAAGNAVRAAGQAANALQRVVEILEGLQEVMAMVALIKELVDSLQDIGQLVEAPEMPVLPSEAEWFIFENNVEEVAEGMPTEVSEVSAWKTRCKNVAVLGRAMVSTAAYISQLQYDIKVEVMRQEISKRHSERLLAIQPADLSSYTSLLTHMDMRNTRMLLVLIRVLHIQNAALMYHSLSLPTHMNAWPVTMDTVWRMLVQHEHAAILGLLRLGPSFDFMRTYVVKDIPVSLLRDGEDCEFNISVQDHLAFPSTWSRVRIHHLEMKFVQEAHVHQPSTHTGKVYILLQGSRIFHDRNEDDVLHYEAAMPLDLHYAYRLDTGETTLSNLPSNDFIRTFIRTTPFTTWRLRLSASAEENEGLDFPTALTADATTQIAITFYVSAIRRISL

SEQ ID NO: 1008 - protein, 893 aa, Coniogramme venusta Ping Wu
MAAAAERRLPDYRELYKDLNQISERVRFDQMEFSEVMVIHRMFIRMEELDLGHLEGAEKVKRLYVFADVVEVAEGVSWGLWRNGPLARLPGSIAIVIVCRVLWVSGVLASLGNNSMMLQLPHMKLRVLEITPSKLEIHRVDTSTEAADYPALCIHASVLECSNIRLANDRDRPPFPVRLFGFRPELRDPNLVFSSVPRSVVDHHPIYEFYVFSVIRDVFPRLPLPESVSVQLDSATRGANWYSLQTGSISQVGSVSLNRFPAEEEELEPAFSLMKTKIPAAILTDPNILLTIQTSLLIAELVEVTHPSAETVAAVAKHAEWVNELLLQATSEAAGTSSHEEYLALLFRSQYLIKVRGRTRSLVVPQLQYDVYSNLINRMAQVAESFDQSLRQVKLFILQNKILGSYLLEQNRALAEKEKDMDVFHSELISQSKLELENTIQKMEQLSLQMETQREGMDQAKEDMDAGLRSFQNRRVAEAMFAVISATAAIGLAFVTGGATAPAAVTAAGNAVRAAGQAANALQRVVEILEGLQEVMAMVALIKELVDSLQDIGQLVEAPEMPVLPSEAEWFIFENNVEEVAEGMPTEVSEVSAWKTRCKNVAVLGRAMVSTAAYISQLQYDIKVEVMRQEISKRHSERLLAIQPADLSSYTSLLTHMDMRNTRMLLALIRVLHIQNAALMYHSLSLPTHMNAWPVTMDTVWRMLVQHEHAAILGLLRLGPSFDFMRTYVVKDIPVSLLRDGEDCEFNISVQDHLAFPSTWSRVRIHHLEMKFVQEAHVHQPSTHTGKVYILLQGSRIFHDRNEDDVLHYEAAMPLDLHYAYRLDTGETTLSNLPSNDFIRTFIRTTPFTTWRLRLSASAEENEGLDFPTALTADATTQIAITFYVSAIRRISL

SEQ ID NO: 1009 - protein, 959 aa, Coniogramme venusta Ping Wu
MCLWKVEMADHEERLTVADMDAATDYDYEFDHDEESPEHLARKVEMVDVADDDDESGMTIVHGESTEQLARGTRSVDFGAEEYRDLNQVSERIRLDQMEFSEVMTIHRMHIKLSELDLGHLEGAEKVKLLYVFADVVEVDEEESGELPVRFPGSMSVFILCRVWHVRAFVGLDGRNHHRVLSLPHMTLHYHSSPARTLHRLDPATLEDVAEPALSIYADVIQVWLQNWPAAIHSVAPFYFESSDSEVLLTRPNQQRPLEKTSLFRARFFRNGIPNPGLPPITSHAFSVRVADRQVLSGGGSFPTSRYSPAFPRGLLTPDIPVIILTDSHILPALQTSLLIAELVELGRPSQATIDAVASHLRWLNKLLLKVIHETKGTAFRQDEYLELSFRAQYLIKKMGNIRSLVVPQLQYSVYSPLINRMAQVAESYDQSLTQFRLFIQQNRILGSFLLEQNRAFAQREKDMDAFHSELISERETELENTLDKMLQLHSQMEQESAEMERARQTMEEGIIDFQRRTILRAVFSIFAAVAGLALAFVTAGAAAPAAVAGASAAVSAVSNTVTVAAALQRIVDMLQILETVMEVVRIIKEVIANMDLVDQLADAPEMPEMPSDHKWLIFMNDVDEVAEEIPPGVSGVSAWRARCRNVAVLGREMITTASFISQLQYEIKVQTMLQEIAKRQAQRLLAIQLPSLTNFTEMVTQMDMRTTRILVTLIKVVEVQNAALMYQYLSKPTQVNAWPVTMDTLWRILVQHEHSAIRGLIRLGPSFDINRNHVVRHIPVYLLMHGKDWQFEIPALHHDGATDDDDEMDAFPSSWSRVRIHHLEMKFVKAPHVHQPTTKTGSIYILLQGSRIFEDRNQGARVHYEAATSLDYHYAYRLETGETTLTNFPSMEFTQTFMRMTPFTTWRLRLSASARENEGLTFPTAIMSGPTDSSEIDPDATTEIAITFSISAIRHVSF

SEQ ID NO: 1010 - protein, 921 aa, Coniogramme venusta Ping Wu
MCLWKVEMVDVADDDDESGMTIVHGESTEQLARGTRSVDFGAEEYRDLNQVSERIRLDQMEFSEVMTIHRMHIKLSELDLGHLEGAEKVKLLYVFADVVEVDEEESGELPVRFPGSMSVFILCRVWHVRAFVGLDGRNHHRVLSLPHMTLHYHSSPARTLHRLDPATLEDVAEPALSIYADVIQVWLQNWPAAIHSVAPFYFESSDSEVLLTRPNQQRPLEKTSLFRARFFRNGIPNPGLPPITSHAFSVRVADRQVLSGGGSFPTSRYSPAFPRGLLTPDIPVIILTDSHILPALQTSLLIAELVELGRPSQATIDAVASHLRWLNKLLLKVIHETKGTAFRQDEYLELSFRAQYLIKKMGNIRSLVVPQLQYSVYSPLINRMAQVAESYDQSLTQFRLFIQQNRILGSFLLEQNRAFAQREKDMDAFHSELISERETELENTLDKMLQLHSQMEQESAEMERARQTMEEGIIDFQRRTILRAVFSIFAAVAGLALAFVTAGAAAPAAVAGASAAVSAVSNTVTVAAALQRIVDMLQILETVMEVVRIIKEVIANMDLVDQLADAPEMPEMPSDHKWLIFMNDVDEVAEEIPPGVSGVSAWRARCRNVAVLGREMITTASFISQLQYEIKVQTMLQEIAKRQAQRLLAIQLPSLTNFTEMVTQMDMRTTRILVTLIKVVEVQNAALMYQYLSKPTQVNAWPVTMDTLWRILVQHEHSAIRGLIRLGPSFDINRNHVVRHIPVYLLMHGKDWQFEIPALHHDGATDDDDEMDAFPSSWSRVRIHHLEMKFVKAPHVHQPTTKTGSIYILLQGSRIFEDRNQGARVHYEAATSLDYHYAYRLETGETTLTNFPSMEFTQTFMRMTPFTTWRLRLSASARENEGLTFPTAIMSGPTDSSEIDPDATTEIAITFSISAIRHVSF

SEQ ID NO: 1011 - protein, 959 aa, Coniogramme venusta Ping Wu
MCLWKVEMADHEERLTVADMDAATDYDYEFDHDEESPEHLARKVEMVDVADDDDESGMTIVHGESTEQLARGTRSVDFGAEEYRDLNQVSERIRLDQMEFSEVMTIHRMRIKLSELDLGHLEGAEKVKLLYVFADVVEVDEEESGELPVRFPGSMSVFILCRVWHVRAFVGLNGRNHHRVLSLPHMTLHYNHSSPARTLHRLDPATLEDVAEPALSIYADVIQVWLQNWPAAIHSVAPFHFESSDSEVLLSRPNRPSLEKTSRFQARLFRNGIPNPGLPPITNHAFSIRVADRQVLSGSGPFPTSRYSPAFPRGLLTPDIPVVILTDSHILPALQTSLLIAELVELGRPSQATIDAVASHLRWLNKLLLKVIHETKGTAFRQDEYLELSFRAQYLIKKMGNIRSLVVPQLQYRVYSPLINRMAQVAESYDQSLTQFRLFIQQNRILGSFLLEQNRAFAQREQDMDAFHSELISERETELENTLDKMLQLHSQMEQESAEMERARQTMEEGIIDFQRRTILRAVFSIFAAVAGLALAFVTAGAAAPAAVAGASAAVSAVSNTVRVAAALQRIVDMLQILETVMEVVRIIKEVIANMDLVDQLADAPEMPEMPSDHTWLIFMNDVDEVAEEIPPGVSGVSAWRARCRNVAVLGREMITTASFISQLQYEIKVQTMLQEIAKRQAERLLAIQLPSLTNFTEMVTQMDMRTTRILVTLIKVVEVQNAALMYQYLSKPTQVNAWPVTMDTLWRILVQHEHSAIRGLIRLGPSFDINRNYVVRHIPVYLLMHGKDWQFEIPALHHDGATDDDDEMDAFPSSWSRVRIHHLEMKFVKAPHVHQPTTKTGSIYILLQGSRIFEDRNQGARVHYEAATSLDYHYAYRLETGETTLTNFPSMEFTQTFMRMTPFTTWRLRLSASARENEGLTFPTAIMSGPTDSSEIDPDATTEIAITFSISAIRHVSF

SEQ ID NO: 1012 - protein, 956 aa, Coniogramme venusta Ping Wu
MCLWKVEMADHEERLTVADMDAATDYDYEFDHDEESPEHLARKVEMVDVADDDDESGMTIVHGESTEQLARSVDFGAEEYRDLNQVSERIRLDQMEFSEVMTIHRMHIKLSELDLGHLEGAEKVKLLYVFADVVEVDEEESGELPVRFPGSMSVFILCRVWHVRAFVGLDGRNHHRVLSLPHMTLHYHSSPARTLHRLDPATLEDVAEPALSIYADVIQVWLQNWPAAIHSVAPFYFESSDSEVLLTRPNQQRPLEKTSLFRARFFRNGIPNPGLPPITSHAFSVRVADRQVLSGGGSFPTSRYSPAFPRGLLTPDIPVIILTDSHILPALQTSLLIAELVELGRPSQATIDAVASHLRWLNKLLLKVIHETKGTAFRQDEYLELSFRAQYLIKKMGNIRSLVVPQLQYSVYSPLINRMAQVAESYDQSLTQFRLFIQQNRILGSFLLEQNRAFAQREKDMDAFHSELISERETELENTLDKMLQLHSQMEQESAEMERARQTMEEGIIDFQRRTILRAVFSIFAAVAGLALAFVTAGAAAPAAVAGASAAVSAVSNTVTVAAALQRIVDMLQILETVMEVVRIIKEVIANMDLVDQLADAPEMPEMPSDHKWLIFMNDVDEVAEEIPPGVSGVSAWRARCRNVAVLGREMITTASFISQLQYEIKVQTMLQEIAKRQAQRLLAIQLPSLTNFTEMVTQMDMRTTRILVTLIKVVEVQNAALMYQYLSKPTQVNAWPVTMDTLWRILVQHEHSAIRGLIRLGPSFDINRNHVVRHIPVYLLMHGKDWQFEIPALHHDGATDDDDEMDAFPSSWSRVRIHHLEMKFVKAPHVHQPTTKTGSIYILLQGSRIFEDRNQGARVHYEAATSLDYHYAYRLETGETTLTNFPSMEFTQTFMRMTPFTTWRLRLSASARENEGLTFPTAIMSGPTDSSEIDPDATTEIAITFSISAIRHVSF

SEQ ID NO: 1013 - protein, 959 aa, Coniogramme venusta Ping Wu
MCLWKVEMADHEERLTVADMDAATDYDYEFDHDEESPEHLARKVEMVDVADDDDESGMTIVHGESTEQLARGTRSVDFGAEEYRDLNQVSERIRLDQMEFSEVMTIHRMHIKLSELDLGHLEGAEKVKLLYVFADVVEVDEEESGELPVRFPGSMSVFILCRVWHVRAFVGLDGRNHHRVLSLPHMTLHYHSSPARTLHRLDPATLEDVAEPALSIYADVIQVWLQNWPAAIHSVAPFYFESSDSEVLLTRPNQQRPLEKTSLFRARFFRNGIPNPGLPPITSHAFSVRVADRQVLSGGGSFPTSRYSPAFPRGLLTPDIPVIILTDSHILPALQTSLLIAELVELGRPSQATIDAVASHLRWLNKLLLKVIHETKGTAFRQDEYLELSFRAQYLIKKMGNIRSLVVPQLQYSVYSPLINRMAQVAESYDQSLTQFRLFIQQNRILGSFLLEQNRAFAQREKDMDAFHSELISERETELENTLDKMLQLHSQMEQESAEMERARQTMEEGIIDFQRRTILRAVFSIFAAVAGLALALVTAGAAAPAAVAGASAAVSAVSNTVTVAAALQRIVDMLQILETVMEVVRIIKEVIANMDLVDQLADAPEMPEMPSDHKWLIFMNDVDEVAEEIPPGVSGVSAWRARCRNVAVLGREMITTASFISQLQYEIKVQTMLQEIAKRQAQRLLAIQLPSLTNFTEMVTQMDMRTTRILVTLIKVVEVQNAALMYQYLSKPTQVNAWPVTMDTLWRILVQHEHSAIRGLIRLGPSFDINRNHVVRHIPVYLLMHGKDWQFEIPALHHDGATDDDDEMDAFPSSWSRVRIHHLEMKFVKAPHVHQPTTKTGSIYILLQGSRIFEDRNQGARVHYEAATSLDYHYAYRLETGETTLTNFPSMEFTQTFMRMTPFTTWRLRLSASARENEGLTFPTAIMSGPTDSSEIDPDATTEIAITFSISAIRHVSF

SEQ ID NO: 1014 - protein, 959 aa, Coniogramme venusta Ping Wu
MCLWKVEMADHEERLTVADMDAATDYDYEFDHDEESPEHLARKVEMVDVADDDDESGMTIVHGESTEQLARGTRSVDFGAEEYRDLNQVSERIRLDQMEFSEVMTIHRMRIKLSELDLGHLEGAEKVKLLYVFADVVEVDEEESGELPVRFPGSMSVFILCRVWHVRAFVGLNGRNHHRVLSLPHMTLHYNHSSPARTLHRLDPATLEDVAEPALSIYADVIQVWLQNWPAAIHSVAPFHFESSDSEVLLSRPNRPSLEKTSRFQARLFRNGIPNPGLPPITNHAFSIRVADRQVLSGSGPFPTSRYSPAFPRGLLTPDIPVVILTDSHILPALQTSLLIAELVELGRPSQATIDAVASHLRWLNKLLLKVIHETKGTAFRQDEYLELSFRAQYLIKKMGNIRSLVVPQLQYRVYSPLINRMAQVAESYDQSLTQFRLFIQQNRILGSFLLEQNRAFAQREKDMDAFHSELISERETELENTLDKMLQLHSQMEQESAEMERARQTMEEGIIDFQRRTILRAVFSIFAAVAGLALAFVTAGAAAPAAVAGASAAVSAVSNTVTVAAALQRIVDMLQILETVMEVVRIIKEVIANMDLVDQLADAPEMPEMPSDHKWLIFMNDVDEVAEEIPPGVSGVSAWRARCRNVAVLGREMITTASFISQLQYEIKVQTMLQEIAKRQAQRLLAIQLPSLTNFTEMVTQMDMRTTRILVTLIKVVEVQNAALMYQYLSKPTQVNAWPVTMDTLWRILVQHEHSAIRGLIRLGPSFDINRNHVVRHIPVYLLMHGKDWQFEIPALHHDGATDDDDEMDAFPSSWSRVRIHHLEMKFVKAPHVHQPTTKTGSIYILLQGSRIFEDRNQGARVHYEAATSLDYHYAYRLETGETTLTNFPSMEFTQTFMRMTPFTTWRLRLSASARENEGLTFPTAIMSGPTDSSEIDPDATTEIAITFSISAIRHVSF

SEQ ID NO: 1015 - protein, 875 aa, Lecanopteris sinuosa
MEYSSLYSNPSLVNPNLQATEFSEVMVVHRMHVSLSQLDINTADSVTRPTLLEGSDKVKRLFIVADVVEVPTAYVFLPASLSVVILCRLLHVTVPPTHHLHGPSVSLTFPFMRFFINEFIADFFPSKDDDAEIGCYIYADRIIRRLATSPSDRRLRLVMVAEGPSVFSRDNWPISRFEFTQDTVTPDEPLSMADSELQRSDEYELQDGTIQFPLAVITFSPLLPPSTSAMGRGLDTARPPVFCYFQFRSDVPSHVLTNPHVVLGMQMTMLFAELVQVAHNAPRVLKLVTRHVEWLNKLLRQVASPNDDILGLLFRVQVFKRTAEQGRGYLVPMLQYHMYSNLIDRMVQAGEAYDRDLKNLQFFIATNQILGNYLLQQNRAFAEREREMSGFHSNVVEMRRDELRNALNKMDLLALQMERENTAMEEAREALDKAILEYQRRQMANAILSVVRAVVGVALAFATAGATLAGAVASAGQAVSAAGQAAASLAKVVATLEALEGVMEFVIALREVADSLGSMNNLVNAPEQPELPSDADWSIFVNEIEAVAGQMPEEVVGPVSVWQAKCKNVAVLGREMCTTTAHIGELTHQIKVEEMLQEIALRQADRLDAISSPQDLSSFTEMLSEIDMRSLRLLLQLIKLLYIQNPALKYEYLFTTTESLDTWPVSMETVRNVLIRQEARAIQGLLQLGVSNDHTLTYVASGIPVGLLVEGHDWVFSFPVHNFDVFPEGFSRVRIRYVELKFDAAGQQAEGGMIHLPSTNTGLLYLLLQCSPSFADRKQQEMLGYEATSGVAYAYAYNLQTGEPTLTNIPSPEFANTFMRMTPFNTWRVRLSASAPENQGLSFLTADSPDDTTQIAITFHFSAVRRIHMREAEDF

SEQ ID NO: 1016 - protein, 875 aa, Lecanopteris sinuosa
MEYSSLYSNPSLVNPNLQATEFSEVMVVHRMHVSLSQLDINTADSVTRPTLLEGSDKVKRLFIVADVVEVPTAHVFLPASLSVVILCRLLHVTVPPTHHLHGPSVSLTFPFMRFFINEFIADFFPSKDDDAEIGCYIYADRIIRRLATSPSDRRLRLVMVAEGPSVFSRDNWPISRFEFTQDTVTPDEPLSMADSELQRSDEYELQDGTIQFPLAVITFSPLLPPSTSAMGRGLDTARPPVFCYFQFRSDVPSHVLTNPHVVLGMQMTMLFAELVQVAHNAPRVLKLVTRHVVWLNKLLRQVASPNDDILGLLFRVQVFKRTAEQGRGYLVPMLQYHMYSNLIDRMVQAGEAYDRDLKNLQFFIATNQILGNYLLQQNRAFAEREREMSGFHSNVVEMRRDELRNALNKMDLLALQMERENTAMEEAREALDKAILEYQRRQMANAILSVVRAVVGVALAFATAGATLAGAVASAGQAVSAAGQAAASLAKVVATLEALEGVMEFVIALREVADSLGSMNNLVNAPEQPELPSDADWSIFVNEIEAVAGQMPEEVVGPVSVWQAKCKNVAVLGREMCTTTAHIGELTHQIKVEEMLQEIALRQADRLDAISSPQDLSSFTEMLSEIDMRSLRLLLQLIKLLYIQNPALKYEYLFTTTESLDTWPVSMETVRNVLIRQEARAIQGLLQLGVSNDHTLTYVASGIPVGLLVEGHDWVFSFPVHNFDVFPEGFSRVRIRYVELKFDAAGQQAEGGMIHLPSTNTGLLYLLLQCSPSFADRKQQEMLGYEATSGVAYAYAYNLQTGEPTLTNIPSPEFANTFMRMTPFNTWRVRLSASAPENQGLSFLTADSPDDTTQIAITFHFSAVRRIHTREAEDF

SEQ ID NO: 1017 - protein, 875 aa, Lecanopteris sinuosa
MEYSSLYSNPSLVNPNLQATEFSEVMVVHRMHVSLSQLDINTADSVTRPTLLEGSDKVKRLFIVADVVEVPTAHVFLPASLSVVILCRLLHVTVPPTHHLHGPSVSLTFPFMRFFINEFIADFFPSKDDDAEIGCYIYADRIIRRLATSPSDRRLRLVMVAEGPSVFSRDNWPISRFEFTQDTVTPDEPLSMADSELQRSDEYELQDGTIQFPLAVITFSPLLPPSTSAMGRGLDTARPPVFCYFQFRSDVPSHVLTNPHVVLGMQMTMLFAELVQVAHNAPRVLKLVTRHVEWLNKLLRQVASPNDDILGLLFRVQVFKRTAEQGRGYLVPMLQYHMYSNLIDRMVQAGEAYDRDLKNLQFFIATNQILGNYLLQQNRAFAEREREMNGFHSNVVEMRRDELRNALNKMDLLALQMERENTAMEEAREALDKAILEYQRRQMANAILSVVRAVVGVALAFATAGATLAGAVASAGQAVSAAGQAAASLAKVVATLEALEGVMEFVIALREVADSLGSMNNLVNAPEQPELPSDADWSIFVNEIEAVAGQMPEEVVGPVSVWQAKCKNVAVLGREMCTTTAHIGELTHQIKVEEMLQEIALRQADRLDAISSPQDLSSFTEMLSEIDMRSLRLLLQLIKLLYIQNPALKYEYLFTTTESLDTWPVSMETVRNVLIRQEARAIQGLLQLGVSNDHTLTYVASGIPVGLLVEGHDWVFSFPVHNFDVFPEGFSRVRIRYVELKFDAAGQQAEGGMIHLPSTNTGLLYLLLQCSPSFADRKNQEMLGYEATSGVAYAYAYNLQTGEPTLTNIPSPEFANTFMRMTPFNTWRVRLSASAPENQGLSFLTADSPDDTTQIAITFHFSAVRRIHTREAEDF

SEQ ID NO: 1018 - protein, 875 aa, Lecanopteris sinuosa
MEYSSLYSNPSLVNPNLQATEFSEVMVVHRMHVSLSQLDINTADSVTRPTLLEGSDKVKRLFIVADVVEVPTAYVFLPASLSVVILCRLLHVTVPPTHHLHGPSVSLTFPFMRFFINEFIADFFPSKDDDAEIGCYIYADRIIRRLATSPSDRRLRLVMVAEGPSVFSRDNWPISRFEFTQDTVTPDEPLSMADSELQRSDEYELQDGTIQFPLAVITFSPLLPPSTSAMGRGLDTARPPVFCYFQFRSDVPSHVLTNPHVVLGMQMTMLFAELVQVAHNAPRVLKLVTRHVEWLNKLLRQVASPNDDILGLLFRVQVFKRTAEQGRGYLVPMLQYHMYSNLIDRMVQAGEAYDRDLKNLQFFIATNQILGNYLLQQNRAFAEREREMSGFHSNVVEMRRDELRNALNKMDLLALQMERENTAMEEAREALDKAILEYQRRQMANAILSVVRAVVGVALAFATAGATLTGAVASAGQAVSAAGQAAASLAKVVATLEALEGVMEFVIALREVADSLGSMNNLVNAPEQPELPSDADWSIFVNEIEAVAGQMPEEVVGPVSVWQAKCKNVAVLGREMCTTTAHIGELTHQIKVEEMLQEIALRQADRLDAISSPQDLSSFTEMLSEIDMRSLRLLLQLIKLLYIQNPALKYEYLFTTTESLDTWPVSMETVRNVLIRQEARAIQGLLQLGVSNDHTLTYVASGIPVGLLVEGHDWVFSFPVHNFDVFPEGFSRVRIRYVELKFDAAGQQAEGGMIHLPSTNTGLLYLLLQCSPSFADRKNQEMLGYEATSGVAYAYAYNLQTGEPTLTNIPSPEFANTFMRMTPFNTWRVRLSASAPENQGLSFLTADSPDDTTQIAITFHFSAVRRIHTREAEDF

SEQ ID NO: 1019 - protein, 875 aa, Lecanopteris sinuosa
MEYSSLYSNPSLVNPNLQATEFSEVMVVHRMHVSLSQLDINTADSVTRPTLLEGSDKVKRLFIVADVVEVPTAYVFLPASLSVVILCRLLHVTVPPTHHLHGPSVSLTFPFMRFFINEFIADFFPSKDDDAEIGCYIYADRIIRRLATSPSDRRLRLVMVAEGPSVFSRDNWPISRFEFTQDTVTPDEPLSMADSELQRSDEYELQDGTIQFPLAVITFSPLLPPSTSAMGRGLDTARPPVFCYFQFRSDVPSHVLTNPHVVLGMQMTMLFAELVQVAHNAPRVLKLVTRHVEWLNKLLRQVASPNDDILGLLFRVQVFKRTAEQGRGYLVPMLQYHMYSNLIDRMVQAGEAYDRDLKNLQFFIATNQILGNYLLQQNRAFAEREREMSGFHSNVVEMRRDELRNALNKMDLLALQMERENTAMEEAREALDKAILEYQRRQMANAILSVVRAVVGVALAFATAGATLTGAVASAGQAVSAAGQAAASLAKVVATLEALEGVMEFVIALREVADSLGSMNNLVNAPEQPELPSDADWSIFVNEIEAVAGQMPEEVVGPVSVWQAKCKNVAVLGREMCTTTAHIGELTHQIKVEEMLQEIALRQADRLDAISSPQDLSSFTEMLSEIDMRSLRLLLQLIKLLYIQNPALKYEYLFTTTESLDTWPVSMETVRNVLIRQEARAIQGLLQLGVSNDHTLTYVASDIPVGLLVEGHDWVFSFPVHNFDVFPEGFSRVRIRYVELKFDAAGQQAEGGMIHLPSTNTGLLYLLLQCSPSFADRKNQEMLGYEATSGVAYAYAYNLQTGEPTLTNIPSPEFANTFMRMTPFNTWRVRLSASAPENQGLSFLTADSPDDTTQIAITFHFSAVRRIHTREAEDF

SEQ ID NO: 1020 - protein, 887 aa, Cyrtomium clivicola fortuni
MEYSSLYGDVNQVSLRFQNTEFSEVMVVHRMYVRLEELDMTGVEGIEKVKRLYVLADVVELPSRATTVFESLRLPATISAIILCRVLYIPEVQRLSGSSFVAQCSLNFPFMRLHVVGRSEGGSGVLQAFSSDATASNIGVYLHADRFIYRQATSPASDFVFPLDVRVSFGSSTFSTDAAPDWQNLNVSSIQYGPQNLSRGPPLTSSDSDLQRSDEIELLARQDIWSPLLHVAFNPNAPPGNVPGTQGLFQPSSACSFFHVPPPDVPANVLSDPSIILGMQMNMLIAELVLAAHNSPQVMNVITKHVLWLNKILLQVASPNDDILALLFRTQAFMKMAKQPRFVVPRLQYHMYSSLINRMVQVAQNYDQELKQLKLFIAQNEILGSYLLEQNKAFAEREKEMSAFHSQVVSMRTSELRSAIESMNTLSLQMQTESEAMNEAQENMVEAIQEYERKLLARALFSVIAAIASVALAFATGGATAPGAVAAAGRAVTAAGRLAEGLQKVVDILQGLQAVMEVVVAIRDIVESLENMGQLVAAPEMPEMPTDSDWLIFVNEVEAVAEQVPTEVAEVPVWKAKCKNVAVLGQAMCTTAAYISELQYEITVEGMLQEIAQRQADRLVGISAADLLSYTEMASQIDMRTTRILLELIKMLYIQNAAIKYEYLYDANEKLNSWPVSMETVWTMLMQQESAALLGLLNLGPTNDFTVTHVVKDIPVKVLVDGYDWNFEIAVEDFAIFPSGLSRVRVRYVELKFDQQGTDGRNIVIHQPSTNTGLVYMLLQGSRFLHDRKREEVMDYEASMGPVYAYAYDLNTGATTLTNIPSQDHANTFMQMTTFNTWRLRLSASAMENQGLVFPTATSPDSTTQISITFYVTAIRRIDYRQEDDVE

SEQ ID NO: 1021 - protein, 887 aa, Cyrtomium clivicola fortuni
MEYSSLYGDVNQVSLRFQNTEFSEVMVVHRMYVRLEELDMTGVEGIEKVKRLYVLADVVELPSRATTVFESLRLPATISAIILCRVLYIPEVQRLSGSSFVAQCSLNFPFMRLHVVGRSEGGSGVLQAFSSDATASNIGVYLHADRFIYRQATSPASDFVFPLDVRVSFGSSTFSTDAAPDWQNLNVSSIQYGPQNLSRGPPLTSSDSDLQRSDEIELLARQDIWSPLLHVAFNPNAPPGNVPGTQGLFQPSSACSFFHVPPPDVPANVLSDPSIILGMQMNMLIAELVLAAHNSPQVMNVITKHVLWLNKILLQVASPNDDILALLFRTQAFMKMAKQPRFVVPRLQYHMYSSLINRMVQVAQNYDQELKQLKLFIAQNEILGSYLLEQNKAFAEREKEMSAFHSQVVSMRTSELRSTIESMNTLSLQMQTESEAMNEAQENMVEAIQEYERKLLARALFSVIAAIASVALAFATGGATAPGAVAAAGRAVTAAGRLAEGLQKVVDILQGLQAVMEVVVAIRDIVESLENMGQLVAAPEMPEMPTDSDWLIFVNEVEAVAEQVPTEVAEVPVWKAKCKNVAVLGQAMCTTAAYISELQYEITVEGMLQEIAQRQADRLVGISAADLLSYTEMASQIDMRTTRILLELIKMLYIQNAAIKYEYLYDANEKLNSWPVSMETVWTMLMQQESAALLGLLNLGPTNDFTVTHVVKDIPVKVLVDGYDWNFEIAVEDFAIFPSGLSRVRVRYVELKFDQQGTDGRNIVIHQPSTNTGLVYMLLQGSRFLHDRKREEVMDYEASMGPVYAYAYDLNTGATTLTNIPSQDHANTFMQMTTFNTWRLRLSASAMENQGLVFPTATSPDSTTQISITFYVTAIRRIDYRQEDDVE

SEQ ID NO: 1022 - protein, 703 aa, Cyrtomium clivicola fortuni
MEYSSLYCDVNQVSLRFQNTEFSEVMVVHRMYVRLARQDIWSPLLHVAFNPNAPPGNVPGTQGLFQPSSACSFFHVPPPDVPANVLSDPSIILGMQMNMLIAELVLAAHNSPQVMNVITKHVLWLNKILLQVASPNDDILALLFRTQAFMKMAKQPRFVVPRLQYHMYSSLINRMVQVAQNYDQELKQLKLFIAQNEILGSYLLEQNKAFAEREKEMSAFHSQVVSMRTSELRSAIESMNTLSLQMQTESEAMNEAQENMVEAIQEYERKLLARALFSVIAAIASVALAFATGGATAPGAVAAAGRAVTAAGRLAEGLQKVVDILQGLQAVMEVVVAIRDIVESLENMGQLVAAPEMPEMPTDSDWLIFVNEVETVAEQVPTEVAEVPVWKAKCKNVAVLGQAMCTTAAYISELQYEITVEGMLQEIAQRQADRLVGISAADLLSYTEMASQIDMRTTRILLELIKMLYIQNAAIKYEYLYDANEKLNSWPVSMETVWTMLMQQESAALLGLLNLGPTNDFTVTHVVKDIPVKVLVDGYDWNFEIAVEDFAIFPSGLSRVRVRYVELKFDQQGTDGRNIVIHQPSTNTGLVYMLLQGSRFLHDRKREEVMDYEASMGPVYAYAYDLNTGATTLTNIPSQDHANTFMQMTTFNTWRLRLSASAMENQGLVFPTATSPDSTTQISITFYVTAIRRIDYRQEDDVE

SEQ ID NO: 1023 - protein, 888 aa, Drynaria rigidula whitei
MHPRGHDGIRIPLQQARGDDYAEERQMRPRFKANGLELDYEKIYAGSNSIAREVGLNKVKCGEVMAIHRMFFRLDTLSQELLRQPELVQRLIVVADVVEIEGSNAPLSLPASSLVLIFCRILILKSKDVVLDLGNWDLRVATTSPLHRCSIRAQRVVIASGSISASLLIQVKHKLEWSDGTHLDQCFGRPFSFTASEVNSSATITTRTTSAMRSINTWPGTAPVSNFIQVNSEQFNVLVNAVPWKGVVDCQAALPSLDDLLHPDVISGIQSTLLIVETILNFQTDNPAIIILARQHAEWIVDSLLQVAHLPNSTVGVSEVKTLLARAQMLMKLPTDGSQHLKVPLLAYGEYQEDIERLLRNAEAYDQEYRALTRFVQLVEIIGSEFLQLSKSLAQRERDIEAFESLVVIRKQSELDQAIRRMNSLMTEIERRSFEMADAKARMEEGLQDYNRRQLTRAIFGILGALLQLCASLKFGGGADIAGGIATTVPAAIDLIHAVQDASASTKLLAISQTLMDLEKIVDVVNAVNALVESATELEDIIHAPELPLILPYTWDILENDIEEFAALMPSEVSEVVTWKAKCRNLVAVCREICIAASFACEVQYELFVHARQQEMARRQAERLEGMQTAADLSSYIELATQADMRTTRLLLSLLNVLAGHQGALHYHYLMELEVFTSSWPSVDGVRMHLLQLNQRARARENALFGDGVLTVDLQHDYVLDAIPVSLLLSGEDWSFTINPERNASAFPTPWDYVRIRYVEMKFTGEHQPVSKTGEIYLLLRSSANFQDRLEEQVLEYEAAVPLVYQYAYNLSTGATTLPNLPSESGKFFRMTPFTRWRLRLSASAYQNEGVSFPTLPDHPDSADSPVQITITFYVTALPQIQSRSLDV

SEQ ID NO: 1024 - protein, 888 aa, Drynaria rigidula whitei
MHPRGHDGIRIPLQQAGGDDYAEERQMRPRFKANGLELDYEKIYAGSNSIAREVGLNKVKCGEVMAIHRMFFRLDTLSQELLRQPELVQRLIVVADVVEIEGSNAPLSLPASSLVLIFCRILILKSKDVVLDLGNWDLRVATTSPLHRCSIRAQRVVIASGSISASLLIQVKHKLEWSDGTHLDQCFGRPFSFTASEVNSSATITTRTTSAMRSINTWPGTAPVSNFIQVNSEQFNVLVNAVPWKGVVDCQAALPSLDDLLHPDVISGIQSTLLIVETILNFQTDNPAIIILARQHAEWIVDSLLQVAHLPNSTVGVSEVKTLLARAQMLMKLPTDGSQHLKVPLLAYGEYQEDIERLLRNAEAYDQEYRALTRFVQLVEIIGSEFLQLSKSLAQRERDIEAFESLVVIRKQSELDQAIRRMNSLMTEIERRSFEMADAKARMEEGLQDYNRRQLTRAIFGILGALLQLCASLKFGGGADIAGGIATTVPAAIDLIHAVQDASASTKLLAISQTLMDLEKIVDVVNAVNALVESATELEDIIHAPELPLILPYTWDILENDIEEFAALMPSEVSEVVTWKAKCRNLVAVCREICIAASFACEVQYELFVHARQQEMARRQAERLEGMQTAADLSSYIELATQADMRTTRLLLSLLNVLAGHQGALHYHYLMELEVFTSSWPSVDGVRMHLLQLNQRARARENALFGDGVLTVDLQHDYVLDAIPVSLLLSGEDWSFTINPERNASAFPTPWDYVRIRYVEMKFTGEHQPVSKTGEIYLLLRSSANFQDRLEEQVLEYEAAVPLVYQYAYNLSTGATTLPNLPSESGKFFRMTPFTRWRLRLSASAYQNEGVSFPTLPDHPDSADSPVQITITFYVTALPQIQSRSLDV

SEQ ID NO: 1025 - protein, 888 aa, Drynaria rigidula whitei
MHPRGHDGIRIPLQQAGGDDYAEERQMRPRFKANGLELDYEKIYAGSNSIAREVGLNKVKCGEVMAIHRMFFRLDTLSQELLRQPELVQRLIVVADVVEIEGSNATLSLPASSLVLIFCRILILKSKDVVLDLGNWDLRVATTSPLHRCSIRAQRVVIASGSISASLLIQVKHKLEWSDGTHLDQCFGRPFSFIASEINSSATITTRTTSAMRSINTWPGTAPVSNFIQVNSEQFNVLVNAVPWKGVVDCQAALPSLDDLLHPDVISGIQSTLLIVETILNFQTDNPAIIILARQHAEWIVDSLLQVVHLPNSTVGVSEVKTLLARAQMLMKLPTDGSQHLRVPLLAYGEYQEDIERLLRNAEAYDQEYRALTRFVQLVEIIGSEFLQLSKSLAQRERDIEAFESLVVIRKQSELDQAIRRMNSLMTEIERRSFEMADAKARMEEGLQDYNRRQLTRAIFGILGALLQLCASLKFGGGADIAGGIATTVPAAIDLIHAVQDASASTKLLAISQTLMDLEKIVDVVNAVNALVESATELEDIIHAPELPLILPYTWDILENDIEEFAALMPSEVSEVVTWKAKCRNLVAVCREICIAASFACEVQYELFVHARQQEMARRQAERLEGMQTAADLSSYIELATQADMRTTRLLLSLLNVLAGHQGALHYHYLMELEVFTSSWPSVDGVRMHLLQLNQRARARENALFGDGVLTVDLQHDYVLNAIPVSLLLSGEDWSFAINPERNASAFPTPWDYVRIRYVEIKFTGEHQPVSRTGEIYLLLRSSANFQDRLEEQVLEYEAAVPLVYQYAYNLSTGATTLPNLPSESGKFFRMTPFTRWRLRLSASAYQNEGVSFPTLPDHPDSADSPVQITITFYVTALPQIQSRSLDV

SEQ ID NO: 1026 - protein, 887 aa, Cyrtomium clivicola fortuni
MEYSSLYGDVNQVSLRFQNTEFSEVMVVHRMYVRLEELDMTGVEGIEKVKRLYVLADVVELPSRATTVFEYVRLPATISAIILCRVLYIPEVQRLSGSSFVAQCSLDFPFMRLHVVGRSEGGTGVLQAFSSDATASNIGVYLHADRFIYRQATSPASDFVFPLDVRVSFGSSTYSTTAVPDWQNLNVSNIRYGPQHLSRGPPLTSSDSDLHRSDEIELLARQDIWSPLLHVAFNPNAPPGNVPGTQGLFQPSSACSFFHVPPPDVPANVLTDPSIILGLQMNMLIAELVLAAHNSPQVMNVVTKHVLWLNKILLQVASPNDDILALLFRIQAFMKMAKQPRFVVPRLQYHMYSSLINRMVQVAQNYDQELKQLKLFIAQNEILGSYLLEQNKAFAEREKEMSAFHSQVVSMRSSELRSAIESMNTLSLQMQTESEAMNEAQENMVEAIQEYERKLLARALFSVIAAIASVALAFATGGATAPGAVAAAGGAVSAAGRLAEGLQKVVDILQGLQAVMEVVVAIRDIVESLENMGQLVAAPEMPELPTDADWLIFVNEVEAVAEQVPTEVAEVPVWKAKCKNVAVLGQAMCTTAAYISELQYEITVEEMLQEIAQRQADRLVGISAADLLSYTEMASQIDMRTTRILLELIKMLYIQNAAIKYEYLYDANEKLNSWPVSMETVWTMLLQQENAALLGLLDLGPTNDFAVTYVVKDIPVKLLVDGYDWNFEISVEDFAIFPSGWSRVRIRYVELKFDQQGTDSRNIVIHQPSTNTGLVYMLLQGSRFLHDRKREEVMDYEASMGPVYAYAYDLNTGATTLTNIPSQQHANTFMQMTTFNTWRLRLSASAMENQGLVFPTATSPDNTTQISITFYVTAIRRIDHRQEDDVE

That which is claimed is:

1. A DNA construct comprising i) a nucleic acid molecule encoding a first polypeptide having at least 95% sequence identity to SEQ ID NO: 1 and having insecticidal activity; and ii) a nucleic acid molecule encoding a second polypeptide having at least 95% sequence identity to SEQ ID NO: 7, and having insecticidal activity, wherein the first polypeptide and the second polypeptide have a different site of action in a heterologous binding assay, wherein the nucleic acid molecule encoding the first polypeptide and the nucleic acid molecule encoding the second polypeptide are each operably linked to a heterologous regulatory element.

2. (canceled)

3. (canceled)

4. A transgenic plant comprising a molecular stack of i) a nucleic acid molecule encoding a first polypeptide having at least 95% sequence identity to SEQ ID NO: 1, and having insecticidal activity; and ii) a nucleic acid molecule encoding a second polypeptide having at least 95% sequence identity to SEQ ID NO: 7, and having insecticidal activity, wherein the first polypeptide and the second polypeptide have a different site of action in a heterologous binding assay, wherein the nucleic acid molecule encoding the first polypeptide and the nucleic acid molecule encoding the second polypeptide are each operably linked to a heterologous regulatory element.

5. The transgenic plant of claim 4, wherein the nucleic acid molecule encoding the first polypeptide, and the nucleic acid molecule encoding the second polypeptide are each operably linked to a heterologous regulatory element.

6. (canceled)

7. A transgenic plant comprising a breeding stack of: i) a nucleic acid molecule encoding a first polypeptide having at least 95% sequence identity to SEQ ID NO: 1 and having insecticidal activity; and ii) a nucleic acid molecule encoding a second polypeptide having at least 95% sequence identity to SEQ ID NO: 7 and having insecticidal activity, wherein the first polypeptide and the second polypeptide have a different site of action in a heterologous binding assay.

8. The transgenic plant of claim 7, wherein the nucleic acid molecule encoding the first polypeptide and the nucleic acid molecule encoding the second polypeptide are each operably linked to a heterologous regulatory element.

9. (canceled)

10. The transgenic plant of claim 4 or progeny thereof, wherein said transgenic plant is corn or soy.

11. A transgenic corn or soy plant comprising the DNA construct of claim 1.

12. A composition comprising: i) a nucleic acid molecule encoding a first polypeptide having at least 95% sequence identity to SEQ ID NO: 1 and having insecticidal activity; and ii) a nucleic acid molecule encoding a second polypeptide having at least 95% sequence identity to SEQ ID NO: 7 and having insecticidal activity, wherein the nucleic acid molecule encoding the first polypeptide and the nucleic acid molecule encoding the second polypeptide are each operably linked to a heterologous regulatory element, wherein the first polypeptide and the second polypeptide have a different site of action in a heterologous binding assay.

13. A method for controlling an insect pest population comprising contacting the insect pest population with the composition of claim 12.
